(19) United States
(12) Patent Application Publication
(10) Pub. No.: US 2011/0158973 A1
(43) Pub. Date: Jun. 30, 2011

(54) SUPPRESSION OF CANCERS

(75) Inventors: Frederic MADEC, Abingdon (GB); Phil LECANE, Abingdon (GB); Philip MARKS, Abingdon (GB); Keith FOSTER, Abingdon (GB)

(73) Assignee: SYNTAXIN LIMITED, Abingdon (GB)

(21) Appl. No.: 12/969,826

(22) Filed: Dec. 16, 2010

Related U.S. Application Data
(63) Continuation-in-part of application No. 12/996,641, filed on Mar. 11, 2011.

(30) Foreign Application Priority Data
Jun. 12, 2008 (GB) 0810782.3
Nov. 17, 2008 (GB) 0820965.2

(51) Int. Cl. A61K 38/48; C12N 9/52; C07H 21/00; A61P 35/00; C12N 9/96

(52) U.S. Cl. 424/94.3; 435/220; 536/23.2; 435/188; 424/94.63

(57) ABSTRACT

The present invention relates to a method for suppressing or treating cancer, in particular to a method for suppressing or treating one or more of colorectal cancer, breast cancer, prostate cancer and/or lung cancer. The therapy employs use of a non-cytotoxic protease, which is targeted to a growth hormone-secreting cell such as to a pituitary cell. When so delivered, the protease is internalised and inhibits secretion/transmission of growth hormone from said cell. The present invention also relates to polypeptides and nucleic acids for use in said methods.

[0001] This application is a continuation-in-part of U.S. patent application Ser. No. 12/996,641, which is a national stage application of International Application No. PCT/GB2009/050666, filed on Jun. 11, 2009, the entirety of which is incorporated by reference herein.

[0002] Pursuant to the provisions of 37 C.F.R. §1.52(e)(5), the sequence listing text file named 77589_Seq_Lstng.txt, created on Dec. 15, 2010 and having a size of 760,644 bytes, and which is being submitted herewith, is incorporated by reference herein in its entirety.

[0003] The present invention relates to the suppression of the growth, maintenance, and progression of common cancers, in particular colorectal, prostate, breast and lung cancers.

[0004] Colorectal cancer is the third most common cancer in both men and women in the United States, according to the World Health Organization's April 2003 report on global cancer rates more than 940,000 new cases are diagnosed every year and nearly 500,000 deaths are reported worldwide each year. The overall 5-year survival rate from colon cancer is approximately 60% and nearly 60,000 people die of the disease each year in the United States.

[0005] Currently employed therapies depend mainly on the location of the tumour in the colon or rectum and the stage of the disease, and may involve a) surgery, b) chemotherapy, c) biological therapy or d) radiation therapy. Surgery to remove the primary tumour is the principal first-line treatment. However, common adverse side effects of surgery include bleeding from the surgery, blood clots in the legs, and damage to nearby organs during the operation.

[0006] Surgical options include: (i) bowel resection, which involves cutting into the abdomen to reach the area of the colon or rectum that is affected by the cancer. The surgeon removes the cancer as well as the parts of the colon or rectum that are next to it. Then the two healthy ends of the colon or rectum are sewn back together; (ii) liver resection, which involves removal of the metastasis that has spread from a colorectal area to the liver, as well as parts of the liver that are next to the cancer. Up to half of the liver can be removed as long as the rest is healthy. Two other methods to destroy cancer cells in the liver include radio waves (radiofrequency ablation) and heat (microwave coagulation), and (iii) cryosurgery (also called cryotherapy) which employs the use of liquid nitrogen to freeze and destroy colorectal cancer that has spread to the liver. It is used when the tumours in the liver are small in size.

[0007] Chemotherapy is typically employed as an adjuvant to surgery to a minority of patients, usually those whose tumour has spread to lymph nodes, for whom the benefit of chemotherapy has been clearly established. However, side effects from chemotherapy include: nausea, vomiting, loss of appetite, hair loss, mouth sores, rash on the hands and feet, and also: risk of infection, bleeding or bruising from minor injuries, and anemia-related fatigue. Chemotherapy can be given in a variety of situations: (i) primary chemotherapy is typically used when colorectal cancer is advanced and has already spread to other parts of the body. In this case, surgery cannot eliminate the cancer, so at this time the physician usually recommends chemotherapy, which can shrink tumour nodules, alleviate symptoms, and prolong life; (ii) adjuvant chemotherapy is employed when chemotherapy is given after a cancer has been surgically removed. The surgery may not eliminate all the cancer, so the adjuvant chemotherapy treatment is often used to kill any cancer cells that may have been missed, such as cells that may have metastasized or spread to the liver; and (iii) neoadjuvant chemotherapy may be employed prior to surgery in order to shrink the tumour so the surgeon can completely remove the tumour with fewer complications. Chemotherapy is often given with radiation to make the radiation more effective.

[0008] Biological therapy can be prescribed to people having cancer, which has already spread. Current therapies include the use of: (i) biological response modifiers, which do not directly destroy the cancer, but instead trigger the immune system to react against the tumours. Biological response modifiers include cytokines such as interferons and interleukins. However, this strategy involves use of large administration doses by injection or infusion in the hope of stimulating the cells of the immune system to act more effectively. In addition, use of biological response modifiers is often associated with flu-like symptoms including fever, chills, nausea, and loss of appetite. Further undesirable side effects include: rashes or swelling at the site of injection, a blood pressure drop as a result of treatment, and fatigue; (ii) colony-stimulating factors, which stimulate the production of bone marrow cells such as red and white blood cells and platelets. Thus, colony-stimulating factors do not directly affect tumours but, instead, help support the immune system during cancer treatment. Regrettably, however, the use of colony-stimulating factors is associated with undesirable side effects such as bone pain, fatigue, fever, and loss of appetite; and (iii) tumour vaccines, which encourage the immune system to recognize cancer cells. Said vaccines are typically employed after the onset of cancer, and are therefore suppressive rather than preventative. Efficacy is poor, and the use of tumour vaccines is associated with muscle aches and low-grade fever.

[0009] A major difficulty with the treatment of colorectal cancers is that 20-25% of patients have clinical detectable liver metastases at the time of the initial diagnosis and a further 40-50% of patients develop liver metastases within three years after primary surgery, usually metastatic disease develops first in the liver.

[0010] Breast cancer is the most common type of cancer in women with the exception of non-melanoma skin cancers. It is estimated that almost 180,000 new cases of invasive breast cancer would be diagnosed among women in the United States in 2007. A woman has a lifetime risk of developing invasive breast cancer of about one in eight (13%).

[0011] Current therapies include: surgery, radiation therapy, chemotherapy, hormone therapy, and biological therapy. The choice of one therapy over another involves consideration of the size and location of the tumour, histological factors such as lymphatic invasion and histological subtype determination, the stage or extent of the disease, and the age and general health of the patient.

[0012] Surgery options include mastectomy or lumpectomy (also called breast conserving therapy or partial mastectomy), with or without lymph node removal. Unfortunately, patients who have undergone mastectomy often suffer from one or more of: wound infection and abscess, necrosis of skin flap, paresthesia of chest wall, phantom breast syndrome, post-surgical pain syndrome, seroma or lymphedema. Similarly, complications associated with lumpectomy include: injury or thrombosis of the axillary vein, seroma formation, lymphedema, impairment of shoulder movements, damage to the brachial plexus, and chest wall pain.

[0013] Radiation therapy is associated with complications such as: necrosis of the breast soft tissue, prolonged breast oedema, rib fracture, decreased shoulder mobility, brachial plexopathy with paresthesia and arm pain, lymphedema, angiosarcoma, lung cancer, coronary artery disease, and symptomatic pneumonitis.

[0014] Current chemotherapy options, however, go hand-in-hand with undesirable side effects such as: nausea, hair loss, early menopause, hot flushes, fatigue and temporarily lowered blood counts. In addition, more severe side-effects include: liver toxicity, hemorrhagic cystitis, amenorrhea, cerebellar ataxia, myocardial dysfunction, peripheral neuropathy, myelosuppression, neurotoxicity, alopecia, and pleural effusion.

[0015] Hormone therapies have to-date focussed on the use of Tamoxifen™, and/or the use of aromatase inhibitors such as Arimidex™, Aromasin™ and Femara™. These therapeutic molecules act by suppressing hormone, especially oestrogen, activity and thus inhibit the growth of breast cancer cells that may remain after breast cancer surgery. Regrettably, however, hormone therapies are associated with undesirable side effects such as hot flushes and vaginal dryness. In particular, Tamoxifen™ treatment has been shown to increase the risk of endometrial cancer, induce perimenopausal symptoms, and increase the risk of developing cataracts.

[0016] Biological therapies have to-date focussed on the use of Herceptin™. However, the use of this therapeutic molecule is associated with adverse effects such as: cardiac toxicity, fever, chills, nausea, vomiting and pain can occur especially after the first infusion.

[0017] Prostate cancer is the second greatest cause of death in the United States in men dying from cancer and is the most common cancer diagnosed in American males. In the US it is estimated that 1 in 10 men will develop prostate cancer in their lifetime.

[0018] As with other cancer types, available treatments depend on a variety of factors, such as the grade and stage of the cancer, the age, and general health of the patient. Current therapies include: (i) watchful waiting based on PSA blood tests, which are performed regularly to check that the condition of a patient hasn't deteriorated. This approach is recommended for small, slow growing, non-aggressive cancers affecting elderly men where the cancer does not affect their life expectancy; (ii) prostatectomy (i.e. removal of the prostate), though this is associated with side effects such as: bladder control problems, urinary leakage, impotence, and anastomotic stricture; (iii) radiotherapy, such as external-beam radiation therapy (EBRT) using high-powered x-rays, though this therapy is associated with rectal problems, persistent bleeding, and rectal ulcer.

[0019] Alternatively, radioactive seed implants, which are implanted directly into the prostate may be employed. This therapy is also known as brachytherapy, and delivers a lower dose of radiation (though over a longer period of time) than is typically achieved via external beams. Unfortunately, this type of therapy is associated with complications such as slow and painful urination, and impotence; (iv) hormone therapy, which is designed to prevent male sex hormones from stimulating cancer cell growth. This is typically achieved by chemical inhibition of male sex hormone secretion, or by surgical means (testicles removal). Unfortunately, these therapies are associated with side effects such as: breast enlargement, reduced sex drive, impotence, hot flushes, weight gain, and reduction in muscles and bone mass. In addition, some hormone therapy drugs have been shown to cause nausea, diarrhoea, fatigue, and liver damage; (v) chemotherapy—employing the same type of drugs as described above in the context of colorectal, breast or prostate cancer; and (vi) cryotherapy, which destroys the cancer cells by freezing the affected tissue. Regrettably, this therapy is limited due to difficulties in monitoring the extent of the freezing process, which frequently results in damage to tissues around the bladder and long term complications (e.g. injury to the rectum or the muscles controlling urination).

[0020] Lung cancer is the leading cause of cancer-related mortality for both men and women in the world. Worldwide lung cancer remains the most common malignancy, with an estimated 1.04 million new cases each year, it represents 12.8% of new cancer cases diagnosed. Lung cancer is the cause of 921,000 deaths each year in the world, accounting for almost 18% of cancer related deaths.

[0021] Current lung cancer therapies involve surgery, radiotherapy and chemotherapy, either separately or in combination. When employing said therapies, physicians take into account: the type of lung cancer (small cell or non-small cell), the size and position of the tumour, the stage of the tumour (presence of metastasis or not outside the lung), and the general health of the patient.

[0022] For non-small cell lung cancers (NSCLC), currently available treatments include: (i) chemotherapy—unfortunately, NSCLC is only moderately sensitive to chemotherapy. Single-agent therapy response rates are in the region of 15%, with newer agents (e.g. Gemcitabine™, Paclitaxel™, Docetaxel™, Vinorelbine™) having slightly higher response rates (20-25%). In addition, chemotherapy is associated with complications such as: a drop in the number of blood cells, nausea, vomiting, diarrhoea, sore mouth and mouth ulcers, hair loss, and fatigue; (ii) biological therapy—recent research efforts have focused heavily on identifying molecular targets and using this knowledge to develop molecular-targeted therapies. Whilst several molecular-targeted therapies are currently being developed and tested in NSCLC, these therapies are associated with undesirable side effects including: flu-like symptoms, such as: chills, fever, muscle aches, fatigue, loss of appetite, nausea, vomiting, and diarrhoea; (iii) radiation therapy. This type of therapy is typically employed as an adjuvant to surgery, or alone when surgical resection is not possible because of limited pulmonary reserve or the presence of comorbid conditions. Alone, radiation therapy, is only associated with 12-16% survival after 5-year in early stage NSCLC. Regrettably, complications are common, and include: nausea, fatigue, skin reaction, hair loss, persistent cough, dry or sore throat, and swallowing difficulties; (iv) combined chemo-radiotherapy—recently studies have shown limited survival in patients with unresectable stage III disease when treated with concurrent (rather than sequential) platinum-based chemotherapy and radiation therapy. As with the above-described cancer types, however, the use of chemotherapy and radiotherapy has a number of undesirable side effects; (v) surgery—this is typically employed when the tumour is at an early stage and/or if the tumour has not spread. Examples include: wedge resection, which involves the removal of a triangle-shaped slice of tissue. Wedge resection is used to remove a tumour and a small amount of normal tissue around it. When a slightly larger amount of tissue is taken, it is called a segmental resection; lobectomy, which involves the removal of a whole lobe (section) of the lung; and pneumonectomy, which involves the removal of one whole lung. The side effects encountered after these interventions include: pain, infection but also: pneumonia, bleeding, blood clots, and other infections. In addition, the perioperative mortality rate is 6% for pneumonectomy, 3% for lobectomy, and 1% for segmentectomy.

[0023] For Small Cell Lung Cancer (SCLC), currently available treatments include: (i) chemotherapy—single-agent chemotherapy shows a rate of response ranging from 17% to 50%. Combination chemotherapy is associated with superior response rates and survival, though major side effects include: myelosuppression, nephrotoxicity, tumour lysis syndrome (characterized by: hyperuricemia, hyperphosphatemia, hypocalcemia, dehydration, and hyperkalemia), spinal cord compression, and hyponatremia; (ii) radiation therapy—this therapy is only used to palliate symptoms, and patients invariably relapse; (iii) surgery—most patients with SCLC are treated non-surgically. The exceptions are a relatively small number of patients (<5%) who present very early stage disease confined to the lung without any lymph node involvement. Such patients usually undergo resection of lung tumours as an initial diagnostic procedure. However, even for these patients, surgery alone is not considered curative.

[0024] Patients with relapsed SCLC have an extremely poor prognosis, approximately 65-70% of patients with SCLC have disseminated disease at presentation. Extensive-stage SCLCs are currently uncurable, and patients with extensive disease have median survival duration of less than 1 year. Even patients presenting with localized disease (i.e. limited stage) have median survival duration of less than 2 years. The 5-year survival rate for SCLC is less than 20%.

[0025] Referring to all of the above-discussed, currently-available therapies (for each of discussed cancer types—colorectal, breast, prostate, and lung cancer), there is a further problem, namely tumour lysis syndrome (TLS). TLS is a very serious and sometimes life-threatening complication of cancer therapy. It can be defined as a constellation of metabolic abnormalities resulting from spontaneous or treatment-related tumour necrosis or fulminant apoptosis. The metabolic abnormalities observed in patients with TLS include: hyperkalemia, hyperuricemia, and hyperphosphatemia with secondary hypocalcemia; and can lead to acute renal failure (ARF).

[0026] Cancer (especially colorectal cancer, breast cancer, prostate cancer, and lung cancer) continues to pose a major problem for animal healthcare on a global scale. Accordingly, there is a need in the art for alternative and/or improved cancer therapeutics and therapies that address one or more of the above problems.

[0027] The present invention solves one or more of said problems, by providing a new category of non-cytotoxic, anticancer agent.

[0028] In more detail, a first aspect of the present invention provides a polypeptide for use in treating cancer, said polypeptide comprising:
[0029] a a non-cytotoxic protease, which protease is capable of cleaving a protein of the exocytic fusion apparatus in a growth hormone-secreting cell;
[0030] b. a Targeting Moiety (TM) that is capable of binding to a Binding Site on a growth hormone-secreting cell, which Binding Site is capable of undergoing endocytosis to be incorporated into an endosome within the growth hormone-secreting cell; and
[0031] c. a translocation domain that is capable of translocating the protease from within an endosome, across the endosomal membrane and into the cytosol of the growth hormone-secreting cell.

[0032] In use, a polypeptide of the invention binds to a growth hormone-secreting cell. Thereafter, the translocation component effects transport of the protease component into the cytosol of the growth hormone-secreting cell. Finally, once inside, the protease inhibits the exocytic fusion process of the growth hormone-secreting cell. Thus, by inactivating the exocytic fusion apparatus of the growth hormone-secreting cell, the polypeptide of the invention inhibits the release/secretion of growth hormone therefrom.

[0033] The ‘bioactive’ component of the polypeptides of the present invention is provided by a non-cytotoxic protease. This distinct group of proteases act by proteolytically-cleaving intracellular transport proteins known as SNARE proteins (e.g. SNAP-25, VAMP, or Syntaxin)—see Gerald K (2002) “Cell and Molecular Biology” (4th edition) John Wiley & Sons, Inc. The acronym SNARE derives from the term Soluble NSF Attachment Receptor, where NSF means N-ethylmaleimide-Sensitive Factor. SNARE proteins are integral to intracellular vesicle formation, and thus to secretion of molecules via vesicle transport from a cell. Accordingly, once delivered to a desired target cell, the non-cytotoxic protease is capable of inhibiting cellular secretion from the target cell.

[0034] The principal target cells to which polypeptides of the present invention bind are normal, non-diseased, non-cancerous cells that secrete growth hormone. These cells are, however, distinct from the ultimate ‘downstream’ cancer cells that are treated in accordance with the present invention.

[0035] The present invention provides polypeptides that are capable of (and for use in) reducing/minimising systemic or serum levels of growth hormone and/or insulin-like growth factor (IGF-1). Also provided, are polypeptides for use in reducing/minimising tumour lysis syndrone (TLS).

[0036] The polypeptides of the present invention are particularly suited for use in treating one or more of: colorectal cancer, breast cancer, prostate cancer and/or lung cancer (e.g. SCLC or NSCLC); including their metastases, precancerous conditions and symptoms thereof. In this regard, ‘treating’ includes reducing, preventing or eliminating cancer cells or the spread thereof in the local, regional or systemic circulation.

[0037] Thus, in a related aspect of the present invention, there is provided a method for treating cancer in a patient, said method comprising administering to the patient a therapeutically effective amount of a polypeptide of the present invention. The present invention also provides a method for reducing growth hormone and/or IGF-1 levels (preferably systemic and/or serum levels) in a patient, said method comprising administering to the patient a therapeutically effective amount of a polypeptide of the present invention. By way of example, in one embodiment, the present invention permits maintenance of a basal level of growth hormone at a threshold of around 10 ng/ml, preferably less than 6 ng/ml, more preferably less than 4 or 5 ng/ml. In a normal person, daily growth hormone levels may typically peak around one hour after the onset of sleep at a level of approximately 35 ng/ml. In this regard, in one embodiment, the present invention permits said peak to be controlled at a threshold of around 25 ng/ml, preferably less than 20 ng/ml, more preferably less than 15 ng/ml. Also provided, is a method for reducing/minimising tumour lysis syndrone (TLS).

[0038] Without wishing to be bound by any theory, the present inventors believe that an elevated systemic level of growth hormone causes the level of systemic IGF-1 to become elevated, and that the latter is responsible for increased IGF-1R activation and an associated increase in oncogene activation, which in turn leads to increased cellular proliferation and the formation/growth of tumours.

[0039] Following administration of a polypeptide of the present invention, a decrease in the secretion of growth hormone (e.g. human GH) from the anterior part of pituitary is observed. Similarly, a reduction of the level of circulating IGF-1 level is observed. Said decrease in GH/IGF-1 level is correlated with shrinkage of the tumour. Thus, use of the polypeptides of the present invention provides a favourable environment for cancer treatment by removing one of the major counter-acting biological pathways.

[0040] Following administration, the regional and distant spread of the cancer is reduced or eliminated. In this regard, without wishing to be bound by any theory, the present inventors believe that the spread of a metastasis is inhibited by the polypeptides of the present invention, which lower of the circulatory concentration of IGF-1.

[0041] An advantage of the present invention is that, after treatment of the cancer, the pituitary functioning returns to normal. In other words, the present invention provides a short-acting therapy that has a minimal post-therapy effect on the pituitary. Thus, in contrast to current hypophysectomy therapies, the present invention avoids the need for complex and unpleasant post-treatment (typically, life-long) regimens to prevent complications resulting from the initial cancer treatment, such as: osteoporosis, short bowel syndrome, memory loss which can lead to Alzheimer's, arthritis, back pain, fibromyalgia and chronic fatigue.

[0042] The biologically active component of the polypeptides of the present invention is a non-cytotoxic protease. Non-cytotoxic proteases are a discrete class of molecules that do not kill cells; instead, they act by inhibiting cellular processes other than protein synthesis. Non-cytotoxic proteases are produced as part of a larger toxin molecule by a variety of plants, and by a variety of microorganisms such as Clostridium sp. and Neisseria sp.

[0043] Clostridial neurotoxins represent a major group of non-cytotoxic toxin molecules, and comprise two polypeptide chains joined together by a disulphide bond. The two chains are termed the heavy chain (H-chain), which has a molecular mass of approximately 100 kDa, and the light chain (L-chain), which has a molecular mass of approximately 50 kDa. It is the L-chain, which possesses a protease function and exhibits a high substrate specificity for vesicle and/or plasma membrane associated (SNARE) proteins involved in the exocytic process (eg. synaptobrevin, syntaxin or SNAP-25). These substrates are important components of the neurosecretory machinery.

[0044] Neisseria sp., most importantly from the species N. gonorrhoeae, and Streptococcus sp., most importantly from the species S. pneumoniae, produce functionally similar non-cytotoxic toxin molecules. An example of such a non-cytotoxic protease is IgA protease (see WO99/58571, which is hereby incorporated in its entirety by reference thereto).

[0045] Thus, the non-cytotoxic protease of the present invention is preferably a clostridial neurotoxin protease or an IgA protease.

[0046] Turning now to the Targeting Moiety (TM) component of the present invention, it is this component that binds the polypeptide of the present invention to a growth hormone-secreting cell, preferably to a pituitary cell and/or to an extrapituitary cell. In one embodiment, the TM binds to the anterior region of the pituitary gland, for example to a somatotroph and/or to a cell of the adenohypophysis.

[0047] Suitable TMs include: ligands to growth hormone-secreting cell receptors such as cytokines, growth factors, neuropeptides, lectins, and antibodies—this term includes monoclonal antibodies, and antibody fragments such as Fab, F(ab)′₂, Fv, ScFv, etc.

[0048] A TM of the invention binds to a receptor on a growth hormone-secreting cell, such as a pituitary cell. By way of example, the TM may bind to a leptin (OB) receptor and isoforms thereof, a ghrelin receptor, a somatostatin (sst) receptor (e.g. sst₁, sst₂, sst₃, sst₄ and sst₅ and splice variants thereof), an insulin growth factor (IGF) receptor (e.g. IGF-1), an erbB receptor (e.g. erbB1, erbB2, erbB3 and erbB4, and splice variants thereof), a VIP-glucagon-GRF-secretin superfamily receptor (including splice variants thereof) such as a pituitary adenylate cyclase activating peptide (PACAP) receptor (e.g. PAC, VPAC₁ and/or VPAC₂), an orexin (OX) receptor and splice variants (e.g. OX₁ and/or OX₂), an interleukin (IL) receptor (e.g. Il-1, IL-2, IL-6 and IL-10 receptor), a nerve growth factor (NTR) receptor (e.g. TrkA(NTR) and p75(NTR)), a vascular endothelial growth factor (VEGF) receptor (e.g. VEGFR1, VEGFR2 and VEGFR3), a bombesin receptor (eg. BRS-1, BRS-2, or BRS-3), a urotensin receptor, a melanin-concentrating hormone receptor 1, a prolactin releasing hormone receptor, a KiSS-1 receptor, a corticotropin-releasing factor receptor 1 and a growth hormone-releasing hormone (GHRH) receptor.

[0049] In one embodiment, a TM of the present invention binds to a leptin receptor. Suitable examples of such TMs include: leptin peptides such as a full-length leptin peptide (eg. leptin₁₆₇), and truncations or peptide analogues thereof such as leptin₂₂₋₁₆₇, leptin₇₀₋₉₅, and leptin₁₁₆₋₁₂₂.

[0050] In another embodiment, a TM of the present invention binds to a ghrelin receptor. Examples of suitable TMs in this regard include: ghrelin peptides such as full-length ghrelin (eg. ghrelin₁₁₇) and truncations or peptide analogues thereof such as ghrelin₂₄₋₁₁₇, and ghrelin₅₂₋₁₁₇; [Trp3, Arg5]-ghrelin (1-5), des-Gln-Ghrelin, cortistatin-8, His-D-Trp-Ala-Trp-D-Phe-Lys-NH₂, growth hormone releasing peptide (e.g. GHRP-6), or hexarelin.

[0051] In one embodiment, a TM of the present invention binds to a somatostatin (SST) receptor. By way of example, suitable TMs include: SST peptides and cortistatin (CST)-peptides, as well as peptide analogues thereof such as D-Phe-Phe-Phe-D-Trp-Lys-Thr-Phe-Thr-NH₂ (BIM 23052), D-Phe-Phe-Tyr-D-Trp-Lys-Val-Phe-D-Nal-NH₂ (BIM 23056) or c[Cys-Phe-Phe-D-Trp-Lys-Thr-Phe-Cys]-NH₂ (BIM-23268). Further examples include the SST peptides SST-14 and SST-28; as well as peptide and peptide analogues such as: octreotide, lanreotide, BIM23027, vapreotide, seglitide, and SOM230. These TMs are preferred TMs for binding to SST receptors, in particular to sst₁, sst₂, sst₃, sst₄ and sst₅ receptors.

[0052] In one embodiment, a TM of the present invention binds to insulin-like growth factor (IGF) receptor. Suitable examples include, for example IGF-1 peptides and IGF-2 peptides.

[0053] In one embodiment, a TM of the present invention binds to a VIP-glucagon-GRF-secretin superfamily receptor, such as to a PAC (eg. PAC₁) or to a VPAC (e.g. VPAC-1 or VPAC-2) receptor. Suitable examples of such TMs include pituitary adenylate cyclase-activating peptides (PACAP), vasoactive intestinal peptides (VIP), as well as truncations and peptide analogues thereof.

[0054] In one embodiment the TM is a VIP peptide including VIP-1 and VIP-2 peptides, for example VIP(1-28), or a truncation or peptide analogue thereof. These TMs demonstrate a selective binding to VPAC-1. Alternatively, a TM demonstrating a selective binding to VPAC2 may be employed, such as, for example mROM (see Yu et al., Peptides 27 (6) p1359-66 (2006), which is hereby incorporated by reference thereto). In another embodiment, the TM may be a PACAP peptide, for example PACAP(1-38) or PACAP(1-27), or a truncation of peptide analogue thereof. These TMs are preferred TMs for binding to PAC (eg. PAC-1) receptors.

[0055] In another embodiment, a TM of the present invention binds to an orexin receptor (eg. OX₁ or OX₂ receptors). Examples of suitable TMs include: full-length orexin-A peptides and truncations or peptide analogues thereof, and orexin-B peptides and truncations or peptide analogues thereof.

[0056] In one embodiment, a TM of the present invention binds to an interleukin receptor. Suitable TM examples include: IL-1 peptides (e.g. IL-1α, IL-β, IL-18 peptides) and truncations or peptide analogues thereof, IL-2 peptides (e.g. IL-2, IL-3, IL-12, IL-23 peptides) and truncations or peptide analogues thereof, and IL-17 peptides (e.g. Il-17A, IL-17C peptides) and truncations or peptide analogues thereof.

[0057] In another embodiment, a TM of the present invention binds to an NGF receptor. Examples of suitable TMs include full-length NGF, and truncations or peptide analogues thereof.

[0058] In one embodiment, a TM of the present invention binds to a vasoactive epidermal growth factor (VEGF) receptor. Examples of suitable TMs include: VEGF peptide (e.g. VEGF-A, VEGF-B, VEGF-C, VEGF-D or VEGF-E and associated splice variants) and truncations or peptide analogues thereof, and placental growth factor (PIGF) and truncations or peptide analogues thereof.

[0059] In another embodiment, a TM of the present invention binds to an ErbB receptor. By way of example, the TM is selected from EGF peptides, transforming growth factor-α (TGF-α) peptides, chimeras of EGF and TGF-α, amphiregulin peptides, betacellulin peptides, epigen peptides, epiregulin peptides, heparin-binding EGF (HB-EGF) peptides, neuregulin (NRG) peptides such as NRG1α, NRG1β, NRG2α, NRG2β, NRG3, NRG4 and neuroregulin splice variants, tomoregulin 1 and 2 peptides, neuroglycan-C peptides, lin-3 peptides, vein peptides, gurken peptides, spitz peptides, or keren peptides; as well as truncations and peptide analogues thereof. There are 4 classes of ErbB receptor (termed ErbB1, erbB2, erbB3 and erbB4), which are also referred to as HER receptors. A number of variants of these receptors exist, which arise from alternate splicing and/or cleavage of the full-length receptor (eg EGFR v1 translation starts at aa543; EGFR vii deletion of aa521-603; EGFR vIV deletion of aa 6-273; EGFRvIII/Δ12-13 deletion of aa 6-273 and 409-520; EGFR vIV deletion of aa 959-1030; EGFR vV truncation at residue 958; EGFR TDM/2-7 tandem duplication of 6-273; EGFR TDM/18-25 tandem duplication of 664-1030; EGFR-TDM/18-26 tandem duplication of 664-1014). In addition, there are four ErbB4 receptor isoforms called erbB4 JM-a, erbB4 JM-b, erbB4 CYT-1 and erbB4 CYT-1.

[0060] Preferred TMs bind to ErbB receptors (eg. ErbB1, ErbB2, ErbB3, ErbB4) and splice variants thereof, in particular the ErbB1 receptor. ErbB TMs may also include proteins which contain EGF motifs with a splice site between the fourth and fifth cysteines within the six cysteine EGF-module, where this module is placed in close proximity to the transmembrane region of the potential ligand. For example, interphotoreceptor matrix proteoglycan-2 (IMP-2), meprin (MEP)1α, MEP1β, mucin (MUC)3, MUC4, MUC12. and MUC17, as well as proteins with a T-knot scaffold such as potato carboxypeptidase inhibitor, and antibodies to ErbB receptors such as cetuximab, ABX-EGF, trastuzumab, or EMD72000. Further examples include chimeras generated by swapping domains (loop sequences and/or connecting amino acids) of different ErbB ligands, such as a mammalian erbB receptor ligand in which the B-loop sequence has replaced by those present in the insect (Drosophila) ErbB ligands, an ErbB ligand in which the C-loop sequence of EGF has been replaced by that of TGFα(44-50), EGF ligands in which one or more domain has been replaced by corresponding sequences in TGFα to create EGF/TGFα chimeras (e.g. E3T, T3E, E4T, T4E, T3E4T, T6E and E3T4E, and EGF chimeras in which the N-terminal TGFα sequence (WSHFND) or the neuregulin sequence (SHLVK) has been used to replace the N-terminal EGF sequence C-terminal of the first cysteine residue (NSDSE), T1E, and Biregulin. Yet further chimeras include EGF in which a domain has been replaced by an EGF-like domain of another protein, such as a blood coagulation, neural development or cell adhesion protein (e.g. Notch 3, Delta 1, EMR1, F4/80, EMR3 and EMR4 receptors).

[0061] In a further embodiment, a TM of the present invention binds to a melanin-concentrating hormone receptor 1. Examples of suitable TMs in this regard include: melanin-concentrating hormone (MCH) peptides such as full-length MCH, truncations and analogues thereof.

[0062] In another embodiment, a TM of the present invention binds to a prolactin releasing hormone receptor. An example of a suitable TM in this regard includes prolactin releasing peptide, truncations and analogues thereof.

[0063] In a further embodiment, a TM of the present invention binds to a KiSS-1 receptor. Examples of suitable TMs in this regard include Kisspeptin-10, Kisspeptin-54 peptides, truncations and analogues thereof.

[0064] In another embodiment, a TM of the present invention binds to a corticotropin-releasing factor receptor 1. Example of a suitable TM in this regard includes corticotropin-releasing hormone, urocortin 1 and urocortin 2, including truncations and analogues thereof.

[0065] In another embodiment, a TM of the present invention binds to a growth-hormone-releasing hormone (GHRH) receptor. GHRH is also known as growth-hormone-releasing factor (GRF or GHRF) or somatocrinin. Suitable TM examples of the present invention include the full-length GHRH (1-44) peptide, and truncations or peptide analogues thereof such as GHRH(1-29); GHRH(1-37); hGHRH(1-40)-OH; [MeTyr1,Ala15,22,Nle27]-hGHRH(1-29)-NH2; [MeTyr1,Ala8,9,15,22,28,Nle27]-hGHRH(1-29)-NH2; cyclo(25-29)[MeTyr1,Ala15,DAsp25,Nle27,Orn29+++]-hGHRH(1-29)-NH2; (D-Tyr1)-GHRH (1-29)-NH₂; (D-Ala2)-GHRH (1-29)-NH2; (D-Asp3)-GHRH (1-29)-NH2 (D-Ala4)-GHRH (1-29)-NH2; (D-Thr7)-GHRH (1-29)-NH2; (D-Asn8)-GHRH (1-29)-NH2; (D-Ser9)-GHRH (1-29)-NH2; (D-Tyr10)-GHRH (1-29)-NH2; (Phe4)-GHRH (1-29)-NH2; (pCl-Phe6)-GHRH (1-29)-NH2; (N-Ac-Tyr1)-GHRH (1-29)-NH2; (N-Ac-Tyr1, D-Ala2)-GHRH (1-29)-NH2; (N-Ac-D-Tyr1, D-Ala2)-GHRH (1-29)-NH2; (N-Ac-D-Tyr1, D-Ala 2, D-Asp3)-GHRH (1-29)-NH2; (D-Ala2, NLeu27)-GHRH (1-29)-NH2; (His1, D-Ala2, NLeu27)-GHRH (1-29)-NH2; (N-Ac-His1, D-Ala2, N-Leu27)-GHRH (1-29)-NH2; (His1, D-Ala 2, D-Ala 4, Nleu27)-GHRH (1-29)-NH2; (D-Ala2, D-Asp3, D-Asn8, NLeu27)-GHRH (1-29)-NH2; (D-Asp3, D-Asn8, NLeu27)-GHRH (1-29)-NH2; [His1, NLeu27]-hGHRH(1-29)-NH2; [NLeu27]-hGHRH(1-29)-NH2; H-Tyr-Ala-Asp-Ala-Ile-Phe-Thr-Asn-Ser-Tyr-Arg-Lys-Val-Leu-Gly-Gln-Leu-Ser-Ala-Arg-Lys-Leu-Leu-Gln-Asp-Ile-Met-Ser-Arg-Gln-Gln-Gly-Glu-Ser-Asn-Gln-Glu-Arg-Gly-Ala-Arg-Ala-Arg-Leu-NH2; H-Tyr-Ala-Asp-Ala-Ile-Phe-Thr-Asn-Ser-Tyr-Arg-Lys-Val-Leu-Gly-Gln-Leu-Ser-Ala-Arg-Lys-Leu-Leu-Gln-Asp-Ile-Met-Ser-Arg-NH2; H-Tyr-D-Ala-Asp-Ala-Ile-Phe-Thr-Asn-Ser-Tyr-Arg-Lys-Val-Leu-Gly-Gln-Leu-Ser-Ala-Arg-Lys-Leu-Leu-Gln-Asp-Ile-Met-Ser-Arg-NH2; H-Tyr-Ala-Asp-Ala-Ile-Phe-Thr-Asn-Ser-Tyr-Arg-Lys-Ile-Leu-Gly-Gln-Leu-Ser-Ala-Arg-Lys-Leu-Leu-Gln-Asp-Ile-Met-Asn-Arg-Gln-Gln-Gly-Glu-Arg-Asn-Gln-Glu-Gln-Gly-Ala-Lys-Val-Arg-Leu-NH2; H-Tyr-Ala-Asp-Ala-Ile-Phe-Thr-Asn-Ser-Tyr-Arg-Lys-Val-Leu-Gly-Gln-Leu-Ser-Ala-Arg-Lys-Leu-Leu-Gln-Asp-Ile-Met-Asn-Arg-Gln-Gln-Gly-Glu-Arg-Asn-Gln-Glu-Gln-Gly-Ala-Lys-Val-Arg-Leu-NH2; His-Val-Asp-Ala-Ile-Phe-Thr-Gln-Ser-Tyr-Arg-Lys-Val-Leu-Ala-Gln-Leu-Ser-Ala-Arg-Lys-Leu-Leu-Gln-Asp-Ile-Leu-Asn-Arg; and His-Val-Asp-Ala-Ile-Phe-Thr-Gln-Ser-Tyr-Arg-Lys-Val-Leu-Ala-Gln-Leu-Ser-Ala-Arg-Lys-Leu-Leu-Gln-Asp-Ile-Leu-Asn-Arg-Gln-Gln-Gly-Glu-Arg-Asn-Gln-Glu-Gln-Gly-Ala.

[0066] In a further embodiment, the TM binds to a bombesin receptor (eg. BRS-1, BRS-2, or BRS-3). TMs for use in the present invention that bind to a bombesin receptor include: bombesin—a 14 amino acid peptide originally isolated from the skin of a frog (pGlu-Gln-Arg-Leu-Gly-Asn-Gln-Trp-Ala-Val-Gly-His-Leu-Met-NH₂); and the two known homologs in mammals, namely neuromedin B, and gastrin releasing peptide (GRP) such as porcine GRP—Ala-Pro-Val-Ser-Val-Gly-Gly-Gly-Thr-Val-Leu-Ala-Lys-Met-Tyr-Pro-Arg-Gly-Asn-His-Trp-Ala-Val-Gly-His-Leu-Met-NH₂, and human GRP—Val-Pro-Leu-Pro-Ala-Gly-Gly-Gly-Thr-Val-Leu-Thr-Lys-Met-Tyr-Pro-Arg-Gly-Asn-His-Trp-Ala-Val-Gly-His-Leu-Met-NH₂. Additional TMs include corresponding bombesin, neuromedin B and GRP truncations as well as peptide analogues thereof.

[0067] In another embodiment, a TM of the present invention binds to a urotensin receptor. Suitable TMs in this regard include urotensin peptides such as Urotensin-II (U-II), which is a cyclic neuropeptide, as well as truncations and peptide analogues thereof. The C-terminal cyclic region of U-II is strongly conserved across different species, and includes the six amino acid residues (-Cys Ple-Trp-Lys-Tyr-Cys-); which is structurally similar to the central region of somatostatin-14 (-Phe-Trp-Lys-Thr-). Urotensin peptides suitable for use in the present invention include the U-II precursor peptides, such as prepro-urotensin-II (including the two human 124 and 139 isoforms thereof), and truncations and analogues thereof such as the eleven residue mature peptide form.

[0068] According to a second aspect of the present invention, there is provided a composition of matter, namely a polypeptide comprising:
[0069] a a non-cytotoxic protease, which protease is capable of cleaving a protein of the exocytic fusion apparatus in a growth hormone-secreting cell;
[0070] b. a Targeting Moiety (TM) that is capable of binding to a Binding Site on a growth hormone-secreting cell, which Binding Site is capable of undergoing endocytosis to be incorporated into an endosome within the growth hormone-secreting cell; and
[0071] d. a translocation domain that is capable of translocating the protease from within an endosome, across the endosomal membrane and into the cytosol of the growth hormone-secreting cell.

[0072] All of the features of the first aspect of the present invention apply equally to the above-described second aspect.

[0073] In a preferred embodiment of the first and/or second aspects of the present invention, the TM has a human peptide amino acid sequence. Thus, a preferred TM is, for example, a human GHRH peptide, a human CST peptide or a human SST peptide.

### Polypeptide Preparation

[0074] The polypeptides of the present invention comprise 3 principal components: a ‘bioactive’ (ie. a non-cytotoxic protease); a TM; and a translocation domain. The general technology associated with the preparation of such fusion proteins is often referred to as re-targeted toxin technology. By way of exemplification, we refer to: WO94/21300; WO96/33273; WO98/07864; WO00/10598; WO01/21213; WO06/059093; WO00/62814; WO00/04926; WO93/15766; WO00/61192; and WO99/58571. All of these publications are herein incorporated by reference thereto.

[0075] In more detail, the TM component of the present invention may be fused to either the protease component or the translocation component of the present invention. Said fusion is preferably by way of a covalent bond, for example either a direct covalent bond or via a spacer/linker molecule. The protease component and the translocation component are preferably linked together via a covalent bond, for example either a direct covalent bond or via a spacer/linker molecule. Suitable spacer/linked molecules are well known in the art, and typically comprise an amino acid-based sequence of between 5 and 40, preferably between 10 and 30 amino acid residues in length.

[0076] In use, the polypeptides have a di-chain conformation, wherein the protease component and the translocation component are linked together, preferably via a disulphide bond.

[0077] The polypeptides of the present invention may be prepared by conventional chemical conjugation techniques, which are well known to a skilled person. By way of example, reference is made to Hermanson, G. T. (1996), Bioconjugate techniques, Academic Press, and to Wong, S. S. (1991), Chemistry of protein conjugation and cross-linking, CRC Press, Nagy et al., PNAS 95 p 1794-99 (1998). Further detailed methodologies for attaching synthetic TMs to a polypeptide of the present invention are provided in, for example, EP0257742. The above-mentioned conjugation publications are herein incorporated by reference thereto.

[0078] Alternatively, the polypeptides may be prepared by recombinant preparation of a single polypeptide fusion protein (see, for example, WO98/07864). This technique is based on the in vivo bacterial mechanism by which native clostridial neurotoxin (ie. holotoxin) is prepared, and results in a fusion protein having the following ‘simplified’ structural arrangement:

NH₂-[protease component]-[translocation component]-[TM]-COOH

[0079] According to WO98/07864, the TM is placed towards the C-terminal end of the fusion protein. The fusion protein is then activated by treatment with a protease, which cleaves at a site between the protease component and the translocation component. A di-chain protein is thus produced, comprising the protease component as a single polypeptide chain covalently attached (via a disulphide bridge) to another single polypeptide chain containing the translocation component plus TM.

[0080] Alternatively, according to WO06/059093, the TM component of the fusion protein is located towards the middle of the linear fusion protein sequence, between the protease cleavage site and the translocation component. This ensures that the TM is attached to the translocation domain (ie. as occurs with native clostridial holotoxin), though in this case the two components are reversed in order vis-à-vis native holotoxin. Subsequent cleavage at the protease cleavage site exposes the N-terminal portion of the TM, and provides the di-chain polypeptide fusion protein.

[0081] The above-mentioned protease cleavage sequence(s) may be introduced (and/or any inherent cleavage sequence removed) at the DNA level by conventional means, such as by site-directed mutagenesis. Screening to confirm the presence of cleavage sequences may be performed manually or with the assistance of computer software (e.g. the MapDraw program by DNASTAR, Inc.). Whilst any protease cleavage site may be employed (ie. clostridial, or non-clostridial), the following are preferred:

| | |
|---|---|
| Enterokinase | (DDDDK↓) |
| Factor Xa | (IEGR↓/IDGR↓) |
| TEV(Tobacco Etch virus) | (ENLYFQ↓G) |
| Thrombin | (LVPR↓GS) |
| PreScission | (LEVLFQ↓GP). |

[0082] Additional protease cleavage sites include recognition sequences that are cleaved by a non-cytotoxic protease, for example by a clostridial neurotoxin. These include the SNARE (eg. SNAP-25, syntaxin, VAMP) protein recognition sequences that are cleaved by non-cytotoxic proteases such as clostridial neurotoxins. Particular examples are provided in US2007/0166332, which is hereby incorporated in its entirety by reference thereto.

[0083] Also embraced by the term protease cleavage site is an intein, which is a self-cleaving sequence. The self-splicing reaction is controllable, for example by varying the concentration of reducing agent present. The above-mentioned ‘activation’ cleavage sites may also be employed as a ‘destructive’ cleavage site (discussed below) should one be incorporated into a polypeptide of the present invention.

[0084] In a preferred embodiment, the fusion protein of the present invention may comprise one or more N-terminal and/or C-terminal located purification tags. Whilst any purification tag may be employed, the following are preferred:

His-tag (e.g. 6× histidine), preferably as a C-terminal and/or N-terminal tag
MBP-tag (maltose binding protein), preferably as an N-terminal tag
GST-tag (glutathione-S-transferase), preferably as an N-terminal tag
His-MBP-tag, preferably as an N-terminal tag
GST-MBP-tag, preferably as an N-terminal tag
Thioredoxin-tag, preferably as an N-terminal tag
CBD-tag (Chitin Binding Domain), preferably as an N-terminal tag.

[0085] One or more peptide spacer/linker molecules may be included in the fusion protein. For example, a peptide spacer may be employed between a purification tag and the rest of the fusion protein molecule.

[0086] Thus, a third aspect of the present invention provides a nucleic acid (e.g. DNA) sequence encoding a polypeptide as described above (i.e. the second aspect of the present invention).

[0087] Said nucleic acid may be included in the form of a vector, such as a plasmid, which may optionally include one or more of an origin of replication, a nucleic acid integration site, a promoter, a terminator, and a ribosome binding site.

[0088] The present invention also includes a method for expressing the above-described nucleic acid sequence (i.e. the third aspect of the present invention) in a host cell, in particular in E. coli or via a baculovirus expression system.

[0089] The present invention also includes a method for activating a polypeptide of the present invention, said method comprising contacting the polypeptide with a protease that cleaves the polypeptide at a recognition site (cleavage site) located between the non-cytotoxic protease component and the translocation component, thereby converting the polypeptide into a di-chain polypeptide wherein the non-cytotoxic protease and translocation components are joined together by a disulphide bond. In a preferred embodiment, the recognition site is not native to a naturally-occurring clostridial neurotoxin and/or to a naturally-occurring IgA protease.

[0090] The polypeptides of the present invention may be further modified to reduce or prevent unwanted side-effects associated with dispersal into non-targeted areas. According to this embodiment, the polypeptide comprises a destructive cleavage site. The destructive cleavage site is distinct from the ‘activation’ site (i.e. di-chain formation), and is cleavable by a second protease and not by the non-cytotoxic protease. Moreover, when so cleaved at the destructive cleavage site by the second protease, the polypeptide has reduced potency (e.g. reduced binding ability to the intended target cell, reduced translocation activity and/or reduced non-cytotoxic protease activity). For completeness, any of the ‘destructive’ cleavage sites of the present invention may be separately employed as an ‘activation’ site in a polypeptide of the present invention.

[0091] Thus, according to this embodiment, the present invention provides a polypeptide that can be controllably inactivated and/or destroyed at an off-site location.

[0092] In a preferred embodiment, the destructive cleavage site is recognised and cleaved by a second protease (i.e. a destructive protease) selected from a circulating protease (e.g. an extracellular protease, such as a serum protease or a protease of the blood clotting cascade), a tissue-associated protease (e.g. a matrix metalloprotease (MMP), such as an MMP of muscle), and an intracellular protease (preferably a protease that is absent from the target cell).

[0093] Thus, in use, should a polypeptide of the present invention become dispersed away from its intended target cell and/or be taken up by a non-target cell, the polypeptide will become inactivated by cleavage of the destructive cleavage site (by the second protease).

[0094] In one embodiment, the destructive cleavage site is recognised and cleaved by a second protease that is present within an off-site cell-type. In this embodiment, the off-site cell and the target cell are preferably different cell types. Alternatively (or in addition), the destructive cleavage site is recognised and cleaved by a second protease that is present at an off-site location (e.g. distal to the target cell). Accordingly, when destructive cleavage occurs extracellularly, the target cell and the off-site cell may be either the same or different cell-types. In this regard, the target cell and the off-site cell may each possess a receptor to which the same polypeptide of the invention binds.

[0095] The destructive cleavage site of the present invention provides for inactivation/destruction of the polypeptide when the polypeptide is in or at an off-site location. In this regard, cleavage at the destructive cleavage site minimises the potency of the polypeptide (when compared with an identical polypeptide lacking the same destructive cleavage site, or possessing the same destructive site but in an uncleaved form). By way of example, reduced potency includes: reduced binding (to a mammalian cell receptor) and/or reduced translocation (across the endosomal membrane of a mammalian cell in the direction of the cytosol), and/or reduced SNARE protein cleavage.

[0096] When selecting destructive cleavage site(s) in the context of the present invention, it is preferred that the destructive cleavage site(s) are not substrates for any proteases that may be separately used for post-translational modification of the polypeptide of the present invention as part of its manufacturing process. In this regard, the non-cytotoxic proteases of the present invention typically employ a protease activation event (via a separate ‘activation’ protease cleavage site, which is structurally distinct from the destructive cleavage site of the present invention). The purpose of the activation cleavage site is to cleave a peptide bond between the non-cytotoxic protease and the translocation or the binding components of the polypeptide of the present invention, thereby providing an ‘activated’ di-chain polypeptide wherein said two components are linked together via a disulphide bond.

[0097] Thus, to help ensure that the destructive cleavage site(s) of the polypeptides of the present invention do not adversely affect the ‘activation’ cleavage site and subsequent disulphide bond formation, the former are preferably introduced into polypeptide of the present invention at a position of at least 20, at least 30, at least 40, at least 50, and more preferably at least 60, at least 70, at least 80 (contiguous) amino acid residues away from the ‘activation’ cleavage site.

[0098] The destructive cleavage site(s) and the activation cleavage site are preferably exogenous (i.e. engineered/artificial) with regard to the native components of the polypeptide. In other words, said cleavage sites are preferably not inherent to the corresponding native components of the polypeptide. By way of example, a protease or translocation component based on BoNT/A L-chain or H-chain (respectively) may be engineered according to the present invention to include a cleavage site. Said cleavage site would not, however, be present in the corresponding BoNT native L-chain or H-chain. Similarly, when the Targeting Moiety component of the polypeptide is engineered to include a protease cleavage site, said cleavage site would not be present in the corresponding native sequence of the corresponding Targeting Moiety.

[0099] In a preferred embodiment of the present invention, the destructive cleavage site(s) and the ‘activation’ cleavage site are not cleaved by the same protease. In one embodiment, the two cleavage sites differ from one another in that at least one, more preferably at least two, particularly preferably at least three, and most preferably at least four of the tolerated amino acids within the respective recognition sequences is/are different.

[0100] By way of example, in the case of a polypeptide chimera containing a Factor Xa ‘activation’ site between clostridial L-chain and H_{N} components, it is preferred to employ a destructive cleavage site that is a site other than a Factor Xa site, which may be inserted elsewhere in the L-chain and/or H_{N} and/or TM component(s). In this scenario, the polypeptide may be modified to accommodate an alternative ‘activation’ site between the L-chain and H_{N} components (for example, an enterokinase cleavage site), in which case a separate Factor Xa cleavage site may be incorporated elsewhere into the polypeptide as the destructive cleavage site. Alternatively, the existing Factor Xa ‘activation’ site between the L-chain and H_{N} components may be retained, and an alternative cleavage site such as a thrombin cleavage site incorporated as the destructive cleavage site.

[0101] When identifying suitable sites within the primary sequence of any of the components of the present invention for inclusion of cleavage site(s), it is preferable to select a primary sequence that closely matches with the proposed cleavage site that is to be inserted. By doing so, minimal structural changes are introduced into the polypeptide. By way of example, cleavage sites typically comprise at least 3 contiguous amino acid residues. Thus, in a preferred embodiment, a cleavage site is selected that already possesses (in the correct position(s)) at least one, preferably at least two of the amino acid residues that are required in order to introduce the new cleavage site. By way of example, in one embodiment, the Caspase 3 cleavage site (DMQD) may be introduced. In this regard, a preferred insertion position is identified that already includes a primary sequence selected from, for example, Dxxx, xMxx, xxQx, xxxD, DMxx, DxQx, DxxD, xMQx, xMxD, xxQD, DMQx, xMQD, DxQD, and DMxD.

[0102] Similarly, it is preferred to introduce the cleavage sites into surface exposed regions. Within surface exposed regions, existing loop regions are preferred.

[0103] In a preferred embodiment of the present invention, the destructive cleavage site(s) are introduced at one or more of the following position(s), which are based on the primary amino acid sequence of BoNT/A. Whilst the insertion positions are identified (for convenience) by reference to BoNT/A, the primary amino acid sequences of alternative protease domains and/or translocation domains may be readily aligned with said BoNT/A positions.

[0104] For the protease component, one or more of the following positions is preferred: 27-31, 56-63, 73-75, 78-81, 99-105, 120-124, 137-144, 161-165, 169-173, 187-194, 202-214, 237-241, 243-250, 300-304, 323-335, 375-382, 391-400, and 413-423. The above numbering preferably starts from the N-terminus of the protease component of the present invention.

[0105] In a preferred embodiment, the destructive cleavage site(s) are located at a position greater than 8 amino acid residues, preferably greater than 10 amino acid residues, more preferably greater than 25 amino acid residues, particularly preferably greater than 50 amino acid residues from the N-terminus of the protease component. Similarly, in a preferred embodiment, the destructive cleavage site(s) are located at a position greater than 20 amino acid residues, preferably greater than 30 amino acid residues, more preferably greater than 40 amino acid residues, particularly preferably greater than 50 amino acid residues from the C-terminus of the protease component.

[0106] For the translocation component, one or more of the following positions is preferred: 474-479, 483-495, 507-543, 557-567, 576-580, 618-631, 643-650, 669-677, 751-767, 823-834, 845-859. The above numbering preferably acknowledges a starting position of 449 for the N-terminus of the translocation domain component of the present invention, and an ending position of 871 for the C-terminus of the translocation domain component.

[0107] In a preferred embodiment, the destructive cleavage site(s) are located at a position greater than 10 amino acid residues, preferably greater than 25 amino acid residues, more preferably greater than 40 amino acid residues, particularly preferably greater than 50 amino acid residues from the N-terminus of the translocation component. Similarly, in a preferred embodiment, the destructive cleavage site(s) are located at a position greater than 10 amino acid residues, preferably greater than 25 amino acid residues, more preferably greater than 40 amino acid residues, particularly preferably greater than 50 amino acid residues from the C-terminus of the translocation component.

[0108] In a preferred embodiment, the destructive cleavage site(s) are located at a position greater than 10 amino acid residues, preferably greater than 25 amino acid residues, more preferably greater than 40 amino acid residues, particularly preferably greater than 50 amino acid residues from the N-terminus of the TM component. Similarly, in a preferred embodiment, the destructive cleavage site(s) are located at a position greater than 10 amino acid residues, preferably greater than 25 amino acid residues, more preferably greater than 40 amino acid residues, particularly preferably greater than 50 amino acid residues from the C-terminus of the TM component.

[0109] The polypeptide of the present invention may include one or more (e.g. two, three, four, five or more) destructive protease cleavage sites. Where more than one destructive cleavage site is included, each cleavage site may be the same or different. In this regard, use of more than one destructive cleavage site provides improved off-site inactivation. Similarly, use of two or more different destructive cleavage sites provides additional design flexibility.

[0110] The destructive cleavage site(s) may be engineered into any of the following component(s) of the polypeptide: the non-cytotoxic protease component; the translocation component; the Targeting Moiety; or the spacer peptide (if present). In this regard, the destructive cleavage site(s) are chosen to ensure minimal adverse effect on the potency of the polypeptide (for example by having minimal effect on the targeting/binding regions and/or translocation domain, and/or on the non-cytotoxic protease domain) whilst ensuring that the polypeptide is labile away from its target site/target cell.

[0111] Preferred destructive cleavage sites (plus the corresponding second proteases) are listed in the Table immediately below. The listed cleavage sites are purely illustrative and are not intended to be limiting to the present invention.

| | Destructive | | | | | | | |
|---|---|---|---|---|---|---|---|---|
| | cleavage site | Tolerated recognition sequence variance | | | | | | |
| Second | recognition | P4-P3-P2-P1-▾-P1′-P2′-P3′ | | | | | | |
| protease | sequence | P4 | P3 | P2 | P1 | P1′ | P2′ | P3′ |
| Thrombin | LVPR▾GS | A, F, G, I, | A, F, G, | P | R | Not D | Not D | — |
| | | L, T, V | I, L, T, | | | or E | or E | |
| | | or M | V, W | | | | | |
| | | | or A | | | | | |
| Thrombin | GR▾G | | | G | R | G | | |
| Factor Xa | IEGR▾ | A, F, G, I, | D or E | G | R | — | — | — |
| | | L, T, V | | | | | | |
| | | or M | | | | | | |
| ADAM17 | PLAQA▾VRSSS | | | | | | | |
| Human | SKGR▾SLIGRV | | | | | | | |
| airway | | | | | | | | |
| trypsin-like | | | | | | | | |
| protease | | | | | | | | |
| (HAT) | | | | | | | | |
| ACE | | — | — | — | — | Not P | Not D | N/A |
| (peptidyl- | | | | | | | or E | |
| dipeptidase | | | | | | | | |
| A) | | | | | | | | |
| Elastase | MEA▾VTY | M, R | E | A, H | V, T | V, T, H | Y | — |
| (leukocyte) | | | | | | | | |
| Furin | RXR/KR▾ | R | X | R | R | | | |
| | | | | or K | | | | |
| Granzyme | IEPD▾ | I | E | P | D | — | — | — |
| Caspase 1 | | F, W, Y, L | — | H, | D | Not | — | — |
| | | | | A, T | | P, E. D. | | |
| | | | | | | Q. K or R | | |
| Caspase 2 | DVAD▾ | D | V | A | D | Not | — | — |
| | | | | | | P, E. D. | | |
| | | | | | | Q. K or R | | |
| Caspase 3 | DMQD▾ | D | M | Q | D | Not | — | — |
| | | | | | | P, E. D. | | |
| | | | | | | Q. K or R | | |
| Caspase 4 | LEVD▾ | L | E | V | D | Not | — | — |
| | | | | | | P, E. D. | | |
| | | | | | | Q. K or R | | |
| Caspase 5 | | L or W | E | H | D | — | — | — |
| Caspase 6 | | V | E | H | D | Not | — | — |
| | | | | or I | | P, E. D. | | |
| | | | | | | Q. K or R | | |
| Caspase 7 | DEVD▾ | D | E | V | D | Not | — | — |
| | | | | | | P, E. D. | | |
| | | | | | | Q. K or R | | |
| Caspase 8 | | I or L | E | T | D | Not | — | — |
| | | | | | | P, E. D. | | |
| | | | | | | Q. K or R | | |
| Caspase 9 | LEHD▾ | L | E | H | D | — | — | — |
| Caspase | IEHD▾ | I | E | H | D | — | — | — |
| 10 | | | | | | | | |

[0112] Matrix metalloproteases (MMPs) are a preferred group of destructive proteases in the context of the present invention. Within this group, ADAM17 (EC 3.4.24.86, also known as TACE), is preferred and cleaves a variety of membrane-anchored, cell-surface proteins to “shed” the extracellular domains. Additional, preferred MMPs include adamalysins, serralysins, and astacins.

[0113] Another group of preferred destructive proteases is a mammalian blood protease, such as Thrombin, Coagulation Factor VIIa, Coagulation Factor IXa, Coagulation Factor Xa, Coagulation Factor XIa, Coagulation Factor XIIa, Kallikrein, Protein C, and MBP-associated serine protease.

[0114] In one embodiment of the present invention, said destructive cleavage site comprises a recognition sequence having at least 3 or 4, preferably 5 or 6, more preferably 6 or 7, and particularly preferably at least 8 contiguous amino acid residues. In this regard, the longer (in terms of contiguous amino acid residues) the recognition sequence, the less likely non-specific cleavage of the destructive site will occur via an unintended second protease.

[0115] It is preferred that the destructive cleavage site of the present invention is introduced into the protease component and/or the Targeting Moiety and/or into the translocation component and/or into the spacer peptide. Of these four components, the protease component is preferred. Accordingly, the polypeptide may be rapidly inactivated by direct destruction of the non-cytotoxic protease and/or binding and/or translocation components.

### Polypeptide Delivery

[0116] In use, the present invention employs a pharmaceutical composition, comprising a polypeptide, together with at least one component selected from a pharmaceutically acceptable carrier, excipient, adjuvant, propellant and/or salt.

[0117] The polypeptides of the present invention may be formulated for oral, parenteral, continuous infusion, inhalation or topical application. Compositions suitable for injection may be in the form of solutions, suspensions or emulsions, or dry powders which are dissolved or suspended in a suitable vehicle prior to use.

[0118] Local delivery means may include an aerosol, or other spray (eg. a nebuliser). In this regard, an aerosol formulation of a polypeptide enables delivery to the lungs and/or other nasal and/or bronchial or airway passages.

[0119] The preferred route of administration is selected from: systemic (eg. iv), laparoscopic and/or localised injection (transphenoidal injection directly into the pituitary).

[0120] In the case of formulations for injection, it is optional to include a pharmaceutically active substance to assist retention at or reduce removal of the polypeptide from the site of administration. One example of such a pharmaceutically active substance is a vasoconstrictor such as adrenaline. Such a formulation confers the advantage of increasing the residence time of polypeptide following administration and thus increasing and/or enhancing its effect.

[0121] The dosage ranges for administration of the polypeptides of the present invention are those to produce the desired therapeutic effect. It will be appreciated that the dosage range required depends on the precise nature of the polypeptide or composition, the route of administration, the nature of the formulation, the age of the patient, the nature, extent or severity of the patient's condition, contraindications, if any, and the judgement of the attending physician. Variations in these dosage levels can be adjusted using standard empirical routines for optimisation.

[0122] Suitable daily dosages (per kg weight of patient) are in the range 0.0001-1 mg/kg, preferably 0.0001-0.5 mg/kg, more preferably 0.002-0.5 mg/kg, and particularly preferably 0.004-0.5 mg/kg. The unit dosage can vary from less that 1 microgram to 30 mg, but typically will be in the region of 0.01 to 1 mg per dose, which may be administered daily or preferably less frequently, such as weekly or six monthly.

[0123] A particularly preferred dosing regimen is based on 2.5 ng of polypeptide as the 1× dose. In this regard, preferred dosages are in the range 1×-100× (i.e. 2.5-250 ng).

[0124] Fluid dosage forms are typically prepared utilising the polypeptide and a pyrogen-free sterile vehicle. The polypeptide, depending on the vehicle and concentration used, can be either dissolved or suspended in the vehicle. In preparing solutions the polypeptide can be dissolved in the vehicle, the solution being made isotonic if necessary by addition of sodium chloride and sterilised by filtration through a sterile filter using aseptic techniques before filling into suitable sterile vials or ampoules and sealing. Alternatively, if solution stability is adequate, the solution in its sealed containers may be sterilised by autoclaving. Advantageously additives such as buffering, solubilising, stabilising, preservative or bactericidal, suspending or emulsifying agents and or local anaesthetic agents may be dissolved in the vehicle.

[0125] Dry powders, which are dissolved or suspended in a suitable vehicle prior to use, may be prepared by filling pre-sterilised ingredients into a sterile container using aseptic technique in a sterile area. Alternatively the ingredients may be dissolved into suitable containers using aseptic technique in a sterile area. The product is then freeze dried and the containers are sealed aseptically.

[0126] Parenteral suspensions, suitable for intramuscular, subcutaneous or intradermal injection, are prepared in substantially the same manner, except that the sterile components are suspended in the sterile vehicle, instead of being dissolved and sterilisation cannot be accomplished by filtration. The components may be isolated in a sterile state or alternatively it may be sterilised after isolation, e.g. by gamma irradiation.

[0127] Advantageously, a suspending agent for example polyvinylpyrrolidone is included in the composition/s to facilitate uniform distribution of the components.

### DEFINITIONS SECTION

[0128] Targeting Moiety (TM) means any chemical structure that functionally interacts with a Binding Site to cause a physical association between the polypeptide of the invention and the surface of a target cell (typically a mammalian cell, especially a human cell). The term TM embraces any molecule (ie. a naturally occurring molecule, or a chemically/physically modified variant thereof) that is capable of binding to a Binding Site on the target cell, which Binding Site is capable of internalisation (eg. endosome formation)—also referred to as receptor-mediated endocytosis. The TM may possess an endosomal membrane translocation function, in which case separate TM and Translocation Domain components need not be present in an agent of the present invention. Throughout the preceding description, specific TMs have been described. Reference to said TMs is merely exemplary, and the present invention embraces all variants and derivatives thereof, which possess a binding (i.e. targeting) ability to a Binding Site on a growth hormone-releasing cell, wherein the Binding Site is capable of internalisation.

[0129] The TM of the present invention binds (preferably specifically binds) to the target cell in question. The term “specifically binds” preferably means that a given TM binds to the target cell with a binding affinity (Ka) of 10⁶ M⁻¹ or greater, for example 10⁷M⁻¹ or greater, 10⁸ M⁻¹ or greater, or 10⁹ M⁻¹ or greater.

[0130] Reference to TM in the present specification embraces fragments and variants thereof, which retain the ability to bind to the target cell in question. By way of example, a variant may have at least 80%, preferably at least 90%, more preferably at least 95%, and most preferably at least 97 or at least 99% amino acid sequence homology with the reference TM. Thus, a variant may include one or more analogues of an amino acid (e.g. an unnatural amino acid), or a substituted linkage. Also, by way of example, the term fragment, when used in relation to a TM, means a peptide having at least ten, preferably at least twenty, more preferably at least thirty, and most preferably at least forty amino acid residues of the reference TM. The term fragment also relates to the above-mentioned variants. Thus, by way of example, a fragment of the present invention may comprise a peptide sequence having at least 10, 20, 30 or 40 amino acids, wherein the peptide sequence has at least 80% sequence homology over a corresponding peptide sequence (of contiguous) amino acids of the reference peptide.

[0131] By way of example, ErbB peptide TMs may be modified to generate mutein ErbB ligands with altered properties such as increased stability. By way of example, ErbB TM muteins include ErbB peptides having amino acid modifications such as a valine residue at position 46 or 47 (EGFVal46 or 47), which confers stability to cellular proteases. ErbB TMs may also have amino acids deleted or additional amino acids inserted. This includes but is not limited to EGF having a deletion of the two C-terminal amino acids and a neutral amino acid substitution at position 51 (particularly EGF51Gln51; see US20020098178A1), and EGF with amino acids deleted (e.g. rEGF2-48; rEGF3-48 and rEGF4-48). Fragments of ErbB TMs may include fragments of TGFα which contain predicted β-turn regions (e.g. a peptide of the sequence Ac-C-H-S-G-Y-V-G-A-R-C-O-OMe), fragments of EGF such as [Ala20]EGF(14-31), and the peptide YHWYGYTPQNVI or GE11. All of the above patent specifications are incorporated herein by reference thereto.

[0132] By way of further example, somatostatin (SST) and cortistatin (CST) have high structural homology, and bind to all known SST receptors. Full-length SST has the amino acid sequence:

MLSCRLQCALAALSIVLALGCVTGAPSDPRLRQFLQKSLAAAAGKQELAK
YFLAELLSEPNQTENDALEPEDLSQAAEQDEMRLELQRSANSNPAMAPRE
RKAGCKNFFWKTFTSC

[0133] Full-length CST has the amino acid sequence:

MYRHKNSWRLGLKYPPSSKEETQVPKTLISGLPGRKSSSRVGEKLQSAHK
MPLSPGLLLLLLSGATATAALPLEGGPTGRDSEHMQEAAGIRKSSLLTFL
AWWFEWTSQASAGPLIGEEAREVARRQEGAPPQQSARRDRMPCRNFFWKT
FSSCK

[0134] Reference to these TMs includes the following fragments (and corresponding variants) thereof:

```
                                  NFFWKTF;
                  (R or K)NFFWKTF;
                C(R or K)NFFWKTF;
(P or G)C(R or K)NFFWKTF;
                                  NFFWKTF(S or T);
                                  NFFWKTF(S or T)S;
                                  NFFWKTF(S or T)SC;
                  (R or K)NFFWKTF(S or T);
                  (R or K)NFFWKTF(S or T)S;
                  (R or K)NFFWKTF(S or T)SC;
                C(R or K)NFFWKTF(S or T);
                C(R or K)NFFWKTF(S or T)S;
                C(R or K)NFFWKTF(S or T)SC;
(P or G)C(R or K)NFFWKTF(S or T);
(P or G)C(R or K)NFFWKTF(S or T)S;
or
(P or G)C(R or K)NFFWKTF(S or T)C.
```

[0135] With regard to the above sequences, where a (P or G) alternative is given, a P is preferred in the case of a CST TM, whereas a G is preferred in the case of an SST TM. Where an (R or K) alternative is given, an R is preferred in the case of a CST TM, whereas a K is preferred in the case of an SST TM. Where an (S or T) alternative is given, an S is preferred in the case of a CST TM, whereas a T is preferred in the case of an SST TM.

[0136] Preferred fragments comprise at least 7 or at least 10 amino acid residues, preferably at least 14 or at least 17 amino acid residues, and more preferably at least 28 or 29 amino acid residues. By way of example, preferred sequences include:

```
SANSNPAMAPRERKAGCKNFFWKTFTSC (SST-28);
                            AGCKNFFWKTFTSC (SST-14);
QEGAPPQQSARRDRMPCRNFFWKTFSSCK (CST-29);
QERPPLQQPPHRDKKPCKNFFWKTFSSCK (CST-29);
QERPPPQQPPHLDKKPCKNFFWKTFSSCK (CST-29)
                        DRMPCRNFFWKTFSSCK (CST-17);
                              PCRNFFWKTFSSCK (CST-14);
and
                              PCKNFFWKTFSSCK (CST-14)
```

[0137] The TM may comprise a longer amino acid sequence, for example, at least 30 or 35 amino acid residues, or at least 40 or 45 amino acid residues, so long as the TM is able to bind to a normal GH-secreting cell, preferably to an SST or to a CST receptor on a normal GH-secreting cell. In this regard, the TM is preferably a fragment of full-length SST or CST, though including at least the core sequence “NFFWKTF” or one of the above-defined primary amino acid sequences.

[0138] By way of further example, GHRH peptides of the present invention include:

| | |
|---|---|
| YADAIFTASYRKVLGQLSARKLLQDILSR; | YADAIFTASYRNVLGQLSARKLLQDILSR; |
| YADAIFTNSYRKVLGQLSARKLLQDIM; | YADAIFTNSYRKVLGQLSARKLLQDIMS; |
| ADAIFTNSYRKVLGQLSARKLLQDIMSR; | |

YADAIFTNSYRKVLGQLSARKLLQDIMSRQQGESNQERGARARL;
YADAIFTNSYRKVLGQLSARKLLQDIMSRQQGESNQERGA;

| | |
|---|---|
| YADAIFTNAYRKVLGQLSARKLLQDIMSR; | YADAIFTNSYRKVLGQLSARKALQDIMSR; |
| YADAIFTASYKKVLGQLSARKLLQDIMSR; | YADAIFTASYKRVLGQLSARKLLQDIMSR; |
| YADAIFTASYNKVLGQLSARKLLQDIMSR; | YADAIFTASYRKVLGQLSAKKLLQDIMSR; |
| YADAIFTASYKKVLGQLSAKKLLQDIMSR; | YADAIFTASYRKVLGQLSANKLLQDIMSR; |
| YADAIFTASYRNVLGQLSARKLLQDIMSR; | YADAIFTASYRKVLGQLSARNLLQDIMSR; |
| YADAIFEASYRKVLGQLSARKLLQDIMSR; | YADAIFTASERKVLGQLSARKLLQDIMSR; |
| YADAIFTASYRKELGQLSARKLLQDIMSR; | YADAIFTASYRKVLGQLSARKLLQDIMSR; |
| YADAIFTESYRKVLGQLSARKLLQDIMSR; | YADAIFTNSYRKVLAQLSARKLLQDIM; |
| YADAIFTNSYRKVLAQLSARKLLQDIMSR; | YADAIFTASYRKVLAQLSARKLLQDIMSR; |
| YADAIFTAAYRKVLAQLSARKALQDIASR; | YADAIFTAAYRKVLAQLSARKALQDIMSR; |

HVDAIFTQSYRKVLAQLSARKLLQDILNRQQGERNQEQGA;

| | |
|---|---|
| HVDAIFTQSYRKVLAQLSARKALQDILSRQQG; | HVDAIFTSSYRKVLAQLSARKLLQDILSR; |
| HVDAIFTTSYRKVLAQLSARKLLQDILSR; | YADAIFTQSYRKVLAQLSARKALQDILNR; |
| YADAIFTQSYRKVLAQLSARKALQDILSR. | |

[0139] It is routine to confirm that a TM binds to the selected target cell. For example, a simple radioactive displacement experiment may be employed in which tissue or cells representative of a growth hormone-secreting cell are exposed to labelled (eg. tritiated) TM in the presence of an excess of unlabelled TM. In such an experiment, the relative proportions of non-specific and specific binding may be assessed, thereby allowing confirmation that the TM binds to the target cell. Optionally, the assay may include one or more binding antagonists, and the assay may further comprise observing a loss of TM binding. Examples of this type of experiment can be found in Hulme, E. C. (1990), Receptor-binding studies, a brief outline, pp. 303-311, In Receptor biochemistry, A Practical Approach, Ed. E. C. Hulme, Oxford University Press.

[0140] In the context of the present invention, reference to a peptide TM (e.g. GHRH peptide, or leptin peptide) embraces peptide analogues thereof, so long as the analogue binds to the same receptor as the corresponding ‘reference’ TM. Said analogues may include synthetic residues such as:

β-Nal=β-naphthylalanine
β-Pal=pyridylalanine
hArg(Bu)=N-guanidino-(butyl)-homoarginine
hArg(Et)₂=N,N′-guanidine-(dimethyl)-homoarginine
hArg(CH₂CF₃)₂=N, N-guanidino-bis-(2,2,2,-trifluoroethyl)-homoarginine
hArg(CH₃, hexyl)=N,N-guanidino-(methyl, hexyl)-homoarginine
Lys(Me)=N^{e}-methyllysine
Lys(iPr)=N^{e}-isopropyllysine
AmPhe=aminomethylphenylalanine
AChxAla=aminocyclohexylalanine
Abu=α-aminobutyric acid
Tpo=4-thiaproline

### MeLeu=N-methylleucine

[0141] Orn=ornithine
Nle—norleucine
Nva=norvaline
Trp(Br)=5-bromo-tryptophan
Trp(F)=5-fluoro-tryptophan
Trp(N0₂)=5-nitro-tryptophan
Gaba=γ-aminobutyric acid

### Bmp=J-mercaptopropionyl

[0142] Ac=acetyl
Pen—pencillamine

[0143] By way of example, the above peptide analogue aspect is described in more detail with reference to specific peptide TMs, such as SST peptides, GHRH peptides, bombesin peptides, ghrelin peptides, and urotensin peptides, though the same principle applies to all TMs of the present invention.

[0144] Somatostatin analogues, which can be used to practice the present invention include, but are not limited to, those described in the following publications, which are hereby incorporated by reference: Van Binst, G. et al. Peptide Research 5: 8 (1992); Horvath, A. et al. Abstract, “Conformations of Somatostatin Analogs Having Antitumor Activity”, 22nd European peptide Symposium, September 13-10,1992, Interlaken, Switzerland; U.S. Pat. No. 5,506,339; EP0363589; U.S. Pat. No. 4,904,642; U.S. Pat. No. 4,871,717; U.S. Pat. No. 4,725,577; U.S. Pat. No. 4,684,620; U.S. Pat. No. 4,650,787; U.S. Pat. No. 4,585,755; U.S. Pat. No. 4,725,577; U.S. Pat. No. 4,522,813; U.S. Pat. No. 4,369,179; U.S. Pat. No. 4,360,516; U.S. Pat. No. 4,328,214; U.S. Pat. No. 4,316,890; U.S. Pat. No. 4,310,518; U.S. Pat. No. 4,291,022; U.S. Pat. No. 4,238,481; U.S. Pat. No. 4,235,886; U.S. Pat. No. 4,211,693; U.S. Pat. No. 4,190,648; U.S. Pat. No. 4,146,612; U.S. Pat. No. 4,133,782; U.S. Pat. No. 5,506,339; U.S. Pat. No. 4,261,885; U.S. Pat. No. 4,282,143; U.S. Pat. No. 4,190,575; U.S. Pat. No. 5,552,520; EP0389180; EP0505680; U.S. Pat. No. 4,603,120; EP0030920; U.S. Pat. No. 4,853,371; WO90/12811; WO97/01579; WO91/18016; WO98/08529 and WO98/08528; WO/0075186 and WO00/06185; WO99/56769; and FR 2,522,655. Each of these publications is incorporated in its entirety by reference thereto.

[0145] Methods for synthesizing analogues are well documented, as illustrated, for example, by the patents cited above. For example, synthesis of H-D-Phe-Phe-Phe-D-Trp-Lys-Thr-Phe-Thr-NH2, can be achieved by following the protocol set forth in Example 1 of EP0395417A1. Similarly, synthesis analogues with a substituted N-terminus can be achieved, for example, by following the protocol set forth in WO88/02756, EP0329295, and U.S. Pat. No. 5,240,561.

[0146] The use of linear SST analogues are also included within the scope of this invention, for example: H-D-Phe-p-chloro-Phe-Tyr-D-Trp-Lys-Thr-Phe-Thr-NH2; H-D-Phe-p-N02-Phe-Tyr-D-Trp-Lys-Val-Phe-Thr-NH2; H-D-*Nal-p-chloro-Phe-Tyr-D-Trp-Lys-Val-Phe-Thr-NH2; H-D-Phe-Phe-Phe-D-Trp-Lys-Thr-Phe-Thr-NH2; H-D-Phe-Phe-Tyr-D-Trp-Lys-Val-Phe-Thr-NH2; H-D-Phe-p-chloro-Phe-Tyr-D-Trp-Lys-Val-Phe-Thr-NH2; and H-D-Phe-Ala-Tyr-D-Trp-Lys-Val-Ala-D-beta-Nal-NH2.

[0147] One or more chemical moieties, eg. a sugar derivative, mono or poly-hydroxy (C2-12) alkyl, mono or poly-hydroxy (C2-12) acyl groups, or a piperazine derivative, can be attached to a SST analogue, e.g. to the N-terminus amino acid—see WO88/02756, EP0329295, and U.S. Pat. No. 5,240,561.

[0148] GHRH peptide analogues date back to the 1990s, and include the ‘standard antagonist’ [Ac-Tyr′, D-Arg2jhGH-RH (1-29) Nha. U.S. Pat. No. 4,659,693 discloses GH-RH antagonistic analogs which contain certain N,N′-dialkyl-omega-guanidino alpha-amino acyl residues in position 2 of the GH-RH (1-29) sequence. Additional examples are provided in WO91/16923, U.S. Pat. No. 5,550,212, U.S. Pat. No. 5,942,489, U.S. Pat. No. 6,057,422, U.S. Pat. No. 5,942,489, U.S. Pat. No. 6,057,422, WO96/032126, WO96/022782, WO96/016707, WO94/011397, WO94/011396, each of which is herein incorporated by reference thereto.

[0149] Examples of bombesin analogues suitable for use in the present invention include TMs comprising: D-Phe-Gln-Trp-Ala-Val-Gly-His-Leu-Met-NH₂ (code named BIM-26218), D-Phe-Gln-Trp-Ala-Val-Gly-His-Leu-Leu-NH₂ (code named BIM-26187); D-Cpa-Gln-Trp-Ala-Val-Gly-His-Leu-φ [CH₂NH]-Phe-NH₂ (code named BIM-26159), and D-Phe-Gln-Trp-Ala-Val-Gly-His-Leu-φ [CH₂NH]-Cpa-NH₂ (code named BIM-26189); D-Phe-Gln-Trp-Ala-Val-N-methyl-D-Ala-His-Leu-methylester, and D-F_{g}-Phe-Gln-Trp-Ala-Val-D-Ala-His-Leu-methylester.

[0150] Bombesin analogues include peptides derived from the naturally-occurring, structurally-related peptides, namely, bombesin, neuromedin B, neuromedin C, litorin, and GRP. The relevant amino acid sequences of these naturally occurring TM peptides are listed below;

Bombesin (last 10 aa's): Gly-Asn-Gln-Trp-Ala-Val-
Gly-His-Leu-Met-NH₂
Neuromedin B: Gly-Asn-Leu-Trp-Ala-Thr-Gly-His-Phe-
Met-NH₂
Neuromedin C: Gly-Asn-His-Trp-Ala-Val-Gly-His-Leu-
Met-NH₂
Litorin: pGlu-Gln-Trp-Ala-Val-Gly-His-Phe-Met-
NH₂
Human GRP (last 10 aa's): Gly-Asn-His-Trp-Ala-
Val-Gly-His-Leu-Met-NH₂

[0151] Analogs suitable for use in the present invention are described in U.S. Ser. No. 502,438, filed Mar. 30, 1990, U.S. Ser. No. 397,169, filed Aug. 21, 1989, U.S. Ser. No. 376,555, filed Jul. 7, 1989, U.S. Ser. No. 394,727, filed Aug. 16, 1989, U.S. Ser. No. 317,941, filed Mar. 2, 1989, U.S. Ser. No. 282,328, filed Dec. 9, 1988, U.S. Ser. No. 257,998, filed Oct. 14, 1988, U.S. Ser. No. 248,771, filed Sep. 23, 1988, U.S. Ser. No. 207,759, filed Jun. 16, 1988, U.S. Ser. No. 204,171, filed Jun. 8, 1988, U.S. Ser. No. 173,311, filed Mar. 25, 1988, U.S. Ser. No. 100,571, filed Sep. 24, 1987; and U.S. Ser. No. 520,225, filed May 9, 1990, U.S. Ser. No. 440,039, filed Nov. 21, 1989. All these applications are hereby incorporated by reference. Bombesin analogs are also described in Zachary et al., Proc. Nat. Aca. Sci. 82:7616 (1985); Heimbrook et al., “Synthetic Peptides: Approaches to Biological Problems”, UCLA Symposium on Mol. and Cell. Biol. New Series, Vol. 86, ed. Tarn and Kaiser; Heinz-Erian et al., Am. J. Physiol. G439 (1986): Martinez at al., J. Med. Chem. 28:1874 (1985); Gargosky et al., Biochem. J. 247:427 (1987); Dubreuil et al. Drug Design and Delivery, Vol 2:49, Harwood Academic Publishers, GB (1987); Heikkila et al., J. Biol. Chem. 262:16456 (1987); Caranikas at al., J. Med. Chem. 25:1313 (1982); Saeed at al., Peptides 10:597 (1989); Rosell et al., Trends in Pharmacological Sciences 3:211 (1982): Lundberg at al., Proc. Nat, Aca. Sci. 80:1120, (1983); Engberg et al., Nature 293:222 (1984); Mizrahi et al., Euro. J. Pharma. 82:101 (1982); Leander et al., Nature 294; 467 (1981); Woll at al., Biochem. Biophys. Res. Comm. 155:359 (1988); Rivier et al., Biochem, 17:1766 (1978); Cuttitta et al., Cancer Surveys 4:707 (1985); Aumelas et al., Int. J. Peptide Res. 30:596 (1987); all of which are also hereby incorporated by reference.

[0152] The analogs can be prepared by conventional techniques, such as those described in WO92/20363 and EP0737691. Additional bombesin analogues are described in, for example, WO89/02897, WO91/17181, WO90/03980 and WO91/02746, all of which are herein incorporated by reference thereto.

[0153] Examples of ghrelin analogues suitable for use as a TM of the present invention comprise: Tyr-DTrp-DLys-Trp-DPhe-NH₂, Tyr-DTrp-Lys-Trp-DPhe-NH₂, His-DTrp-DLys-Trp-DPhe-NH₂, His-DTrp-DLys-Phe-DTrp-NH₂, His-DTrp-DArg-Trp-DPhe-NH₂, His-DTrp-DLys-Trp-DPhe-Lys-NH₂, DesaminoTyr-DTrp-Ala-Trp-DPhe-NH₂, DesaminoTyr-DTrp-DLys-Trp-DPhe-NH₂, DeaminoTyr-DTrp-Ser-Trp-DPhe-Lys-NH₂, DesaminoTyr-DTrp-Ser-Trp-DPhe-NH₂, His-DTrp-DTrp-Phe-Met-NH₂, Tyr-DTrp-DTrp-Phe-Phe-NH₂, Glyψ[CH₂NH]-DβNal-Ala-Trp-DPhe-Lys-NH₂, Glyψ[CH2NH]-DbetaNal-DLyS-TrP-DPhe-Lys-NH₂, DAla-DbetaNal-DLys-DTrp-Phe-Lys-NH₂, His-DbetaNal-DLys-Trp-DPhe-Lys-NH₂, Ala-His-DTrp-DLys-Trp-DPhe-Lys-NH₂, Alaφ[CH₂NH]-DbetaNal-Ala-Trp-DPhe-Lys-NH₂, DbetaNal-Ala-Trp-DPhe-Ala-NH₂, DAla-DcyclohexylAla-Ala-Phe-DPhe-Nle-NH₂, DcyclohexylAla-Ala-Phe-DTrp-Lys-NH₂, DAla-DbetaAla-Thr-DThr-Lys-NH₂, DcyclohexylAla-Ala-Trp-DPhe-NH₂, DAla-DbetaNal-Ala-Ala-DAla-Lys-NH₂, DbetaNal-Ala-Trp-DPhe-Leu-NH₂, His-DTrp-Phe-Trp-DPhe-Lys-NH₂, DAla-DbetaNal-DAla-DTrp-Phe-Lys-NH₂, pAla-Trp-DAla-DTrp-Phe-NH₂, His-Trp-DAla-DTrp-Phe-Lys-NH₂, DLys-DpNal-Ala-Trp-DPhe-Lys-NH₂, DAla-DbetaNal-DLys-DTrp-Phe-Lys-NH₂, Tyr-DAla-Phe-Aib-NH₂, Tyr-DAla-Sar-NMePhe-NH₂, αγAbu-DTrp-DTrp-Ser-NH₂, αγAbu-DTrp-DTrp-Lys-NH₂, αγAbu-DTrp-DTrp-Orn-NH₂, αAbu-DTrp-DTrp-Orn-NH₂, DThr-D\acute{α}Nal-DTrp-DPro-Arg-NH₂, DAla-Ala-DAla-DTrp-Phe-Lys-NH₂, Alaψ[CH₂NH]His-DTrp-Ala-Trp-DPhe-Lys-NH₂, Lys-DHis-DTrp-Phe-NH₂, γAbu-DTrp-DTrp-Orn-NH₂, inip-Trp-Trp-Phe-NH₂, Ac-DTrp-Phe-DTrp-Leu-NH₂, Ac-DTrp-Phe-DTrp-Lys-NH₂, Ac-DTrp-DTrp-Lys-NH₂, DLys-Tyr-DTrp-DTrp-Phe-Lys-NH₂, Ac-DbetaNal-Leu-Pro-NH₂, pAla-Trp-DTrp-DTrp-Orn-NH₂, DVal-DαNal-DTrp-Phe-Arg-NH₂, DLeu-DαNal-DTrp-Phe-Arg-NH₂, CyclohexylAla-DαNal-DTrp-Phe-Arg-NH₂, DTp-DαNal-DTrp-Phe-Arg-NH₂, DAla-DβNal-DPro-Phe-Arg-NH₂, Ac-DαNal-DTrp-Phe-Arg-NH₂, DαNal-DTrp-Phe-Arg-NH₂, His-DTrp-DTrp-Lys-NH₂; Ac-DpNal-DTrp-NH₂, αAib-DTrp-DcyclohexylAla-NH₂, αAib-DTrp-DAla-cyclohexylAla-NH₂, DAla-DcyclohexylAla-Ala-Ala-Phe-DPhe-Nle-NH₂, DPhe-Ala-Phe-DPal-NH₂, DPhe-Ala-Phe-DPhe-Lys-NH₂, DLys-Tyr-DTrp-DTrp-Phe-NH₂, Ac-DLys-Tyr-DTrp-DTrp-Phe-NH₂, Arg-DTrp-Leu-Tyr-Trp-Pro(cyclic Arg-Pro), Ac-DβNal-PicLys-ILys-DPhe-NH2, DPal-Phe-DTrp-Phe-Met-NH₂, DPhe-Trp-DPhe-Phe-Met-NH₂, DPal-Trp-DPhe-Phe-Met-NH₂, pAla-Pal-DTrp-DTrp-Orn-NH₂, αγAbu-Trp-DTrp-DTrp-Orn-NH₂, βAla-Trp-DTrp-DTrp-Lys-NH₂, γAbu-Trp-DTrp-DTrp-Orn-NH₂, Ava-Trp-DTrp-DTrp-Orn-NH₂, DLys-Tyr-DTrp-Ala-Trp-DPhe-NH₂, His-DTrp-DArg-Trp-DPhe-NH₂, <Glu-His-Trp-DSer-DArg-NH₂, DPhe-DPhe-DTrp-Met-DLys-NH₂, 0-(2-methylallyl) benzophonone oxime, (R)-2-amino-3-(IH-indol-3-yl)-I-(4-phenylpiperidin-1-yl)propan-1-one, N-((R)-1-((R)-1-((S)-3-(IH-indol-3-yl)-1-oxo-1-(4-phenylpiperidin-1-yl)propan-2-ylamino)-6-amino-1-oxohexan-2-ylamino)-3-hydroxy-1-oxopropan-2-yl)benzamide, (S)—N—((S)-3-(1H-indol-3-yl)-1-oxo-1-(4-phenylpiperidin-1-yl)propan-2-yl)-6-acetamido-2-((S)-2-amino-3-(benzyloxy)propanamido)hexanamide, (S)—N—((R)-3-(1H-indol-3-yl)-1-oxo-1-phenylpiperidin-1-yl)propan-2-yl)-2-((S)-2-acetamido-3-(benzyloxy)propanamido)-6-aminohexanamide, (R)—N-(3-(1H-indol-3-yl)-1-(4-(2-methoxyphenyl)piperidin-1-yl)-1-oxopropan-2-yl)-4-aminobutanamide, (R)—N-(3-(1H-indol-3-yl)-1 methoxyphenyl)piperidin-1-yl)-1-oxopropan-2-yl)-2-amino-2-methylpropanamide, methyl 3-(p-tolylcarbamoyl)-2-naphthoate, ethyl 3-(4-(2-methoxyphenyl)piperidine-1-carbonyl)-2-naphthoate, 3-(2-methoxyphenylcarbamoyl)-2-naphthoate; (S)-2,4-diamino-N—((R)-3-(naphthalen-2-ylmethoxy)-1-oxo-1-(4-phenylpiperidin-1-yl)propan-2-yl)butanamide, naphthalene-2,3-diylbis((4-(2-methoxyphenyl)piperazin-1-yl)methanone), (R)-2-amino-N-(3-(benzyloxy)-1-oxo-1-(4-phenylpiperazin-1-yl)propan-2-yl)-2-methylpropanamide, or (R)-2-amino-3-(benzyloxy)-1-(4-phenylpiperazin-1 yl)propan-1-one.

[0154] Examples of urotensin analogues suitable for use as a TM of the present invention comprise: Cpa-c [D-Cys-Phe-Trp-Lys-Thr-Cys]-Val-NH2; and Asp-c[Cys-Phe-Trp-Lys-Tyr-Cys]-Val-OH.

[0155] The polypeptides of the present invention lack a functional H_{C} domain of a clostridial neurotoxin. Accordingly, said polypeptides are not able to bind rat synaptosomal membranes (via a clostridial H_{C} component) in binding assays as described in Shone et al. (1985) Eur. J. Biochem. 151, 75-82. In a preferred embodiment, the polypeptides preferably lack the last 50 C-terminal amino acids of a clostridial neurotoxin holotoxin. In another embodiment, the polypeptides preferably lack the last 100, preferably the last 150, more preferably the last 200, particularly preferably the last 250, and most preferably the last 300 C-terminal amino acid residues of a clostridial neurotoxin holotoxin. Alternatively, the Hc binding activity may be negated/reduced by mutagenesis—by way of example, referring to BoNT/A for convenience, modification of one or two amino acid residue mutations (W1266 to L and Y1267 to F) in the ganglioside binding pocket causes the H_{C} region to lose its receptor binding function. Analogous mutations may be made to non-serotype A clostridial peptide components, e.g. a construct based on botulinum B with mutations (W1262 to L and Y1263 to F) or botulinum E (W1224 to L and Y1225 to F). Other mutations to the active site achieve the same ablation of H_{C} receptor binding activity, e.g. Y1267S in botulinum type A toxin and the corresponding highly conserved residue in the other clostridial neurotoxins. Details of this and other mutations are described in Rummel et al (2004) (Molecular Microbiol. 51:631-634), which is hereby incorporated by reference thereto.

[0156] In another embodiment, the polypeptides of the present invention lack a functional H_{C} domain of a clostridial neurotoxin and also lack any functionally equivalent TM. Accordingly, said polypeptides lack the natural binding function of a clostridial neurotoxin and are not able to bind rat synaptosomal membranes (via a clostridial H_{C} component, or via any functionally equivalent TM) in binding assays as described in Shone et al. (1985) Eur. J. Biochem. 151, 75-82.

[0157] In one embodiment, the TM is preferably not a Wheat Germ Agglutinin (WGA) peptide.

[0158] The H_{C} peptide of a native clostridial neurotoxin comprises approximately 400-440 amino acid residues, and consists of two functionally distinct domains of approximately 25 kDa each, namely the N-terminal region (commonly referred to as the H_{CN} peptide or domain) and the C-terminal region (commonly referred to as the H_{CC} peptide or domain). This fact is confirmed by the following publications, each of which is herein incorporated in its entirety by reference thereto: Umland T C (1997) Nat. Struct. Biol. 4: 788-792; Herreros J (2000) Biochem. J. 347: 199-204; Halpern J (1993) J. Biol. Chem. 268: 15, pp. 11188-11192; Rummel A (2007) PNAS 104: 359-364; Lacey D B (1998) Nat. Struct. Biol. 5: 898-902; Knapp (1998) Am. Cryst. Assoc. Abstract Papers 25: 90; Swaminathan and Eswaramoorthy (2000) Nat. Struct. Biol. 7: 1751-1759; and Rummel A (2004) Mol. Microbiol. 51(3), 631-643. Moreover, it has been well documented that the C-terminal region (H_{CC}), which constitutes the C-terminal 160-200 amino acid residues, is responsible for binding of a clostridial neurotoxin to its natural cell receptors, namely to nerve terminals at the neuromuscular junction—this fact is also confirmed by the above publications. Thus, reference throughout this specification to a clostridial heavy-chain lacking a functional heavy chain H_{C} peptide (or domain) such that the heavy-chain is incapable of binding to cell surface receptors to which a native clostridial neurotoxin binds means that the clostridial heavy-chain simply lacks a functional H_{CC} peptide. In other words, the H_{CC} peptide region is either partially or wholly deleted, or otherwise modified (e.g. through conventional chemical or proteolytic treatment) to inactivate its native binding ability for nerve terminals at the neuromuscular junction.

[0159] Thus, in one embodiment, a clostridial H_{N} peptide of the present invention lacks part of a C-terminal peptide portion (H_{CC}) of a clostridial neurotoxin and thus lacks the H_{C} binding function of native clostridial neurotoxin. By way of example, in one embodiment, the C-terminally extended clostridial H_{N} peptide lacks the C-terminal 40 amino acid residues, or the C-terminal 60 amino acid residues, or the C-terminal 80 amino acid residues, or the C-terminal 100 amino acid residues, or the C-terminal 120 amino acid residues, or the C-terminal 140 amino acid residues, or the C-terminal 150 amino acid residues, or the C-terminal 160 amino acid residues of a clostridial neurotoxin heavy-chain. In another embodiment, the clostridial H_{N} peptide of the present invention lacks the entire C-terminal peptide portion (H_{CC}) of a clostridial neurotoxin and thus lacks the H_{C} binding function of native clostridial neurotoxin. By way of example, in one embodiment, the clostridial H_{N} peptide lacks the C-terminal 165 amino acid residues, or the C-terminal 170 amino acid residues, or the C-terminal 175 amino acid residues, or the C-terminal 180 amino acid residues, or the C-terminal 185 amino acid residues, or the C-terminal 190 amino acid residues, or the C-terminal 195 amino acid residues of a clostridial neurotoxin heavy-chain. By way of further example, the clostridial H_{N} peptide of the present invention lacks a clostridial H_{CC} reference sequence selected from the group consisting of:
[0160] Botulinum type A neurotoxin—amino acid residues (Y1111-L1296)
[0161] Botulinum type B neurotoxin—amino acid residues (Y1098-E1291)
[0162] Botulinum type C neurotoxin—amino acid residues (Y1112-E1291)
[0163] Botulinum type D neurotoxin—amino acid residues (Y1099-E1276)
[0164] Botulinum type E neurotoxin—amino acid residues (Y1086-K1252)
[0165] Botulinum type F neurotoxin—amino acid residues (Y1106-E1274)
[0166] Botulinum type G neurotoxin—amino acid residues (Y1106-E1297)
[0167] Tetanus neurotoxin—amino acid residues (Y1128-D1315).

[0168] The above-identified reference sequences should be considered a guide as slight variations may occur according to sub-serotypes.

[0169] The protease of the present invention embraces all non-cytotoxic proteases that are capable of cleaving one or more proteins of the exocytic fusion apparatus in eukaryotic cells.

[0170] The protease of the present invention is preferably a bacterial protease (or fragment thereof). More preferably the bacterial protease is selected from the genera Clostridium or Neisseria/Streptococcus (e.g. a clostridial L-chain, or a neisserial IgA protease preferably from N. gonorrhoeae or S. pneumoniae).

[0171] The present invention also embraces variant non-cytotoxic proteases (ie. variants of naturally-occurring protease molecules), so long as the variant proteases still demonstrate the requisite protease activity. By way of example, a variant may have at least 70%, preferably at least 80%, more preferably at least 90%, and most preferably at least 95 or at least 98% amino acid sequence homology with a reference protease sequence. Thus, the term variant includes non-cytotic proteases having enhanced (or decreased) endopeptidase activity—particular mention here is made to the increased K_{cat}/Kₘ of BoNT/A mutants Q161A, E54A, and K165L see Ahmed, S. A. (2008) Protein J. DOI 10.1007/s10930-007-9118-8, which is incorporated by reference thereto. The term fragment, when used in relation to a protease, typically means a peptide having at least 150, preferably at least 200, more preferably at least 250, and most preferably at least 300 amino acid residues of the reference protease. As with the TM ‘fragment’ component (discussed above), protease ‘fragments’ of the present invention embrace fragments of variant proteases based on a reference sequence.

[0172] The protease of the present invention preferably demonstrates a serine or metalloprotease activity (e.g. endopeptidase activity). The protease is preferably specific for a SNARE protein (e.g. SNAP-25, synaptobrevin/VAMP, or syntaxin).

[0173] Particular mention is made to the protease domains of neurotoxins, for example the protease domains of bacterial neurotoxins. Thus, the present invention embraces the use of neurotoxin domains, which occur in nature, as well as recombinantly prepared versions of said naturally-occurring neurotoxins.

[0174] Exemplary neurotoxins are produced by clostridia, and the term clostridial neurotoxin embraces neurotoxins produced by C. tetani (TeNT), and by C. botulinum (BoNT) serotypes A-G, as well as the closely related BoNT-like neurotoxins produced by C. baratii and C. butyricum. The above-mentioned abbreviations are used throughout the present specification. For example, the nomenclature BoNT/A denotes the source of neurotoxin as BoNT (serotype A). Corresponding nomenclature applies to other BoNT serotypes.

[0175] BoNTs are the most potent toxins known, with median lethal dose (LD50) values for mice ranging from 0.5 to 5 ng/kg depending on the serotype. BoNTs are adsorbed in the gastrointestinal tract, and, after entering the general circulation, bind to the presynaptic membrane of cholinergic nerve terminals and prevent the release of their neurotransmitter acetylcholine. BoNT/B, BoNT/D, BoNT/F and BoNT/G cleave synaptobrevin/vesicle-associated membrane protein (VAMP); BoNT/C, BoNT/A and BoNT/E cleave the synaptosomal-associated protein of 25 kDa (SNAP-25); and BoNT/C cleaves syntaxin.

[0176] BoNTs share a common structure, being di-chain proteins of ˜150 kDa, consisting of a heavy chain (H-chain) of ˜100 kDa covalently joined by a single disulphide bond to a light chain (L-chain) of ˜50 kDa. The H-chain consists of two domains, each of ˜50 kDa. The C-terminal domain (H_{C}) is required for the high-affinity neuronal binding, whereas the N-terminal domain (H_{N}) is proposed to be involved in membrane translocation. The L-chain is a zinc-dependent metalloprotease responsible for the cleavage of the substrate SNARE protein.

[0177] The term L-chain fragment means a component of the L-chain of a neurotoxin, which fragment demonstrates a metalloprotease activity and is capable of proteolytically cleaving a vesicle and/or plasma membrane associated protein involved in cellular exocytosis.

[0178] Examples of suitable protease (reference) sequences include:

| | |
|---|---|
| Botulinum type A neurotoxin | amino acid residues (1-448) |
| Botulinum type B neurotoxin | amino acid residues (1-440) |
| Botulinum type C neurotoxin | amino acid residues (1-441) |
| Botulinum type D neurotoxin | amino acid residues (1-445) |
| Botulinum type E neurotoxin | amino acid residues (1-422) |
| Botulinum type F neurotoxin | amino acid residues (1-439) |
| Botulinum type G neurotoxin | amino acid residues (1-441) |
| Tetanus neurotoxin | amino acid residues (1-457) |
| IgA protease | amino acid residues (1-959)* |

*Pohlner, J. et al. (1987). Nature 325, pp. 458-462, which is hereby incorporated by reference thereto.

[0179] The above-identified reference sequence should be considered a guide as slight variations may occur according to sub-serotypes. By way of example, US 2007/0166332 (hereby incorporated by reference thereto) cites slightly different clostridial sequences:

| | |
|---|---|
| Botulinum type A neurotoxin | amino acid residues (M1-K448) |
| Botulinum type B neurotoxin | amino acid residues (M1-K441) |
| Botulinum type C neurotoxin | amino acid residues (M1-K449) |
| Botulinum type D neurotoxin | amino acid residues (M1-R445) |
| Botulinum type E neurotoxin | amino acid residues (M1-R422) |
| Botulinum type F neurotoxin | amino acid residues (M1-K439) |
| Botulinum type G neurotoxin | amino acid residues (M1-K446) |
| Tetanus neurotoxin | amino acid residues (M1-A457) |

[0180] A variety of clostridial toxin fragments comprising the light chain can be useful in aspects of the present invention with the proviso that these light chain fragments can specifically target the core components of the neurotransmitter release apparatus and thus participate in executing the overall cellular mechanism whereby a clostridial toxin proteolytically cleaves a substrate. The light chains of clostridial toxins are approximately 420-460 amino acids in length and comprise an enzymatic domain. Research has shown that the entire length of a clostridial toxin light chain is not necessary for the enzymatic activity of the enzymatic domain. As a non-limiting example, the first eight amino acids of the BoNT/A light chain are not required for enzymatic activity. As another non-limiting example, the first eight amino acids of the TeNT light chain are not required for enzymatic activity. Likewise, the carboxyl-terminus of the light chain is not necessary for activity. As a non-limiting example, the last 32 amino acids of the BoNT/A light chain (residues 417-448) are not required for enzymatic activity. As another non-limiting example, the last 31 amino acids of the TeNT light chain (residues 427-457) are not required for enzymatic activity. Thus, aspects of this embodiment can include clostridial toxin light chains comprising an enzymatic domain having a length of, for example, at least 350 amino acids, at least 375 amino acids, at least 400 amino acids, at least 425 amino acids and at least 450 amino acids. Other aspects of this embodiment can include clostridial toxin light chains comprising an enzymatic domain having a length of, for example, at most 350 amino acids, at most 375 amino acids, at most 400 amino acids, at most 425 amino acids and at most 450 amino acids.

[0181] The non-cytotoxic protease component of the present invention preferably comprises a BoNT/A, BoNT/B or BoNT/D serotype L-chain (or fragment or variant thereof).

[0182] The polypeptides of the present invention, especially the protease component thereof, may be PEGylated—this may help to increase stability, for example duration of action of the protease component. PEGylation is particularly preferred when the protease comprises a BoNT/A, B or C₁ protease. PEGylation preferably includes the addition of PEG to the N-terminus of the protease component. By way of example, the N-terminus of a protease may be extended with one or more amino acid (e.g. cysteine) residues, which may be the same or different. One or more of said amino acid residues may have its own PEG molecule attached (e.g. covalently attached) thereto. An example of this technology is described in WO2007/104567, which is incorporated in its entirety by reference thereto.

[0183] A Translocation Domain is a molecule that enables translocation of a protease into a target cell such that a functional expression of protease activity occurs within the cytosol of the target cell. Whether any molecule (e.g. a protein or peptide) possesses the requisite translocation function of the present invention may be confirmed by any one of a number of conventional assays.

[0184] For example, Shone C. (1987) describes an in vitro assay employing liposomes, which are challenged with a test molecule. Presence of the requisite translocation function is confirmed by release from the liposomes of K⁺ and/or labelled NAD, which may be readily monitored [see Shone C. (1987) Eur. J. Biochem; vol. 167(1): pp. 175-180].

[0185] A further example is provided by Blaustein R. (1987), which describes a simple in vitro assay employing planar phospholipid bilayer membranes. The membranes are challenged with a test molecule and the requisite translocation function is confirmed by an increase in conductance across said membranes [see Blaustein (1987) FEBS Letts; vol. 226, no. 1: pp. 115-120].

[0186] Additional methodology to enable assessment of membrane fusion and thus identification of Translocation Domains suitable for use in the present invention are provided by Methods in Enzymology Vol 220 and 221, Membrane Fusion Techniques, Parts A and B, Academic Press 1993.

[0187] The present invention also embraces variant translocation domains, so long as the variant domains still demonstrate the requisite translocation activity. By way of example, a variant may have at least 70%, preferably at least 80%, more preferably at least 90%, and most preferably at least 95% or at least 98% amino acid sequence homology with a reference translocation domain. The term fragment, when used in relation to a translocation domain, means a peptide having at least 20, preferably at least 40, more preferably at least 80, and most preferably at least 100 amino acid residues of the reference translocation domain. In the case of a clostridial translocation domain, the fragment preferably has at least 100, preferably at least 150, more preferably at least 200, and most preferably at least 250 amino acid residues of the reference translocation domain (eg. H_{N} domain). As with the TM ‘fragment’ component (discussed above), translocation ‘fragments’ of the present invention embrace fragments of variant translocation domains based on the reference sequences.

[0188] The Translocation Domain is preferably capable of formation of ion-permeable pores in lipid membranes under conditions of low pH. Preferably it has been found to use only those portions of the protein molecule capable of pore-formation within the endosomal membrane.

[0189] The Translocation Domain may be obtained from a microbial protein source, in particular from a bacterial or viral protein source. Hence, in one embodiment, the Translocation Domain is a translocating domain of an enzyme, such as a bacterial toxin or viral protein.

[0190] It is well documented that certain domains of bacterial toxin molecules are capable of forming such pores. It is also known that certain translocation domains of virally expressed membrane fusion proteins are capable of forming such pores. Such domains may be employed in the present invention.

[0191] The Translocation Domain may be of a clostridial origin, such as the H_{N} domain (or a functional component thereof). H_{N} means a portion or fragment of the H-chain of a clostridial neurotoxin approximately equivalent to the amino-terminal half of the H-chain, or the domain corresponding to that fragment in the intact H-chain. The H-chain lacks the natural binding function of the H_{C} component of the H-chain. In this regard, the H_{C} function may be removed by deletion of the H_{C} amino acid sequence (either at the DNA synthesis level, or at the post-synthesis level by nuclease or protease treatment). Alternatively, the H_{C} function may be inactivated by chemical or biological treatment. Thus, the H-chain is incapable of binding to the Binding Site on a target cell to which native clostridial neurotoxin (i.e. holotoxin) binds.

[0192] Examples of suitable (reference) Translocation Domains include:

| | |
|---|---|
| Botulinum type A neurotoxin | amino acid residues (449-871) |
| Botulinum type B neurotoxin | amino acid residues (441-858) |
| Botulinum type C neurotoxin | amino acid residues (442-866) |
| Botulinum type D neurotoxin | amino acid residues (446-862) |
| Botulinum type E neurotoxin | amino acid residues (423-845) |
| Botulinum type F neurotoxin | amino acid residues (440-864) |
| Botulinum type G neurotoxin | amino acid residues (442-863) |
| Tetanus neurotoxin | amino acid residues (458-879) |

[0193] The above-identified reference sequence should be considered a guide as slight variations may occur according to sub-serotypes. By way of example, US 2007/0166332 (hereby incorporated by reference thereto) cites slightly different clostridial sequences:

| | |
|---|---|
| Botulinum type A neurotoxin | amino acid residues (A449-K871) |
| Botulinum type B neurotoxin | amino acid residues (A442-S858) |
| Botulinum type C neurotoxin | amino acid residues (T450-N866) |
| Botulinum type D neurotoxin | amino acid residues (D446-N862) |
| Botulinum type E neurotoxin | amino acid residues (K423-K845) |
| Botulinum type F neurotoxin | amino acid residues (A440-K864) |
| Botulinum type G neurotoxin | amino acid residues (S447-S863) |
| Tetanus neurotoxin | amino acid residues (S458-V879) |

[0194] In the context of the present invention, a variety of Clostridial toxin H_{N} regions comprising a translocation domain can be useful in aspects of the present invention with the proviso that these active fragments can facilitate the release of a non-cytotoxic protease (e.g. a clostridial L-chain) from intracellular vesicles into the cytoplasm of the target cell and thus participate in executing the overall cellular mechanism whereby a clostridial toxin proteolytically cleaves a substrate.

[0195] The H_{N} regions from the heavy chains of Clostridial toxins are approximately 410-430 amino acids in length and comprise a translocation domain. Research has shown that the entire length of a H_{N} region from a Clostridial toxin heavy chain is not necessary for the translocating activity of the translocation domain. Thus, aspects of this embodiment can include clostridial toxin H_{N} regions comprising a translocation domain having a length of, for example, at least 350 amino acids, at least 375 amino acids, at least 400 amino acids and at least 425 amino acids. Other aspects of this embodiment can include clostridial toxin H_{N} regions comprising translocation domain having a length of, for example, at most 350 amino acids, at most 375 amino acids, at most 400 amino acids and at most 425 amino acids.

[0196] For further details on the genetic basis of toxin production in Clostridium botulinum and C. tetani, we refer to Henderson et al (1997) in The Clostridia: Molecular Biology and Pathogenesis, Academic press.

[0197] The term H_{N} embraces naturally-occurring neurotoxin H_{N} portions, and modified H_{N} portions having amino acid sequences that do not occur in nature and/or synthetic amino acid residues, so long as the modified H_{N} portions still demonstrate the above-mentioned translocation function.

[0198] Alternatively, the Translocation Domain may be of a non-clostridial origin. Examples of non-clostridial (reference) Translocation Domain origins include, but not be restricted to, the translocation domain of diphtheria toxin [O=Keefe et al., Proc. Natl. Acad. Sci. USA (1992) 89, 6202-6206; Silverman et al., J. Biol. Chem. (1993) 269, 22524-22532; and London, E. (1992) Biochem. Biophys. Acta., 1112, pp. 25-51], the translocation domain of Pseudomonas exotoxin type A [Prior et al. Biochemistry (1992) 31, 3555-3559], the translocation domains of anthrax toxin [Blanke et al. Proc. Natl. Acad. Sci. USA (1996) 93, 8437-8442], a variety of fusogenic or hydrophobic peptides of translocating function [Plank et al. J. Biol. Chem. (1994) 269, 12918-12924; and Wagner et al (1992) PNAS, 89, pp. 7934-7938], and amphiphilic peptides [Murata et al (1992) Biochem., 31, pp. 1986-1992]. The Translocation Domain may mirror the Translocation Domain present in a naturally-occurring protein, or may include amino acid variations so long as the variations do not destroy the translocating ability of the Translocation Domain.

[0199] Particular examples of viral (reference) Translocation Domains suitable for use in the present invention include certain translocating domains of virally expressed membrane fusion proteins. For example, Wagner et al. (1992) and Murata et al. (1992) describe the translocation (i.e. membrane fusion and vesiculation) function of a number of fusogenic and amphiphilic peptides derived from the N-terminal region of influenza virus haemagglutinin. Other virally expressed membrane fusion proteins known to have the desired translocating activity are a translocating domain of a fusogenic peptide of Semliki Forest Virus (SFV), a translocating domain of vesicular stomatitis virus (VSV) glycoprotein G, a translocating domain of SER virus F protein and a translocating domain of Foamy virus envelope glycoprotein. Virally encoded Aspike proteins have particular application in the context of the present invention, for example, the E1 protein of SFV and the G protein of the G protein of VSV.

[0200] Use of the (reference) Translocation Domains listed in Table (below) includes use of sequence variants thereof. A variant may comprise one or more conservative nucleic acid substitutions and/or nucleic acid deletions or insertions, with the proviso that the variant possesses the requisite translocating function. A variant may also comprise one or more amino acid substitutions and/or amino acid deletions or insertions, so long as the variant possesses the requisite translocating function.

| Translocation | Amino acid | |
|---|---|---|
| Domain source | residues | References |
| Diphtheria toxin | 194-380 | Silverman et al., 1994, J. Biol. |
| | | Chem. 269, 22524-22532 |
| | | London E., 1992, Biochem. |
| | | Biophys. Acta., 1113, 25-51 |
| Domain II of | 405-613 | Prior et al., 1992, Biochemistry |
| pseudomonas | | 31, 3555-3559 |
| exotoxin | | Kihara & Pastan, 1994, Bioconj |
| | | Chem. 5, 532-538 |
| Influenza virus | GLFGAIAGFIENGWE | Plank et al., 1994, J. Biol. Chem. |
| haemagglutinin | GMIDGWYG, and | 269, 12918-12924 |
| | Variants thereof | Wagner et al., 1992, PNAS, 89, |
| | | 7934-7938 |
| | | Murata et al., 1992, Biochemistry |
| | | 31, 1986-1992 |
| Semliki Forest virus | Translocation domain | Kielian et al., 1996, J Cell Biol. |
| fusogenic protein | | 134(4), 863-872 |
| Vesicular Stomatitis | 118-139 | Yao et al., 2003, Virology 310(2), |
| virus glycoprotein G | | 319-332 |
| SER virus F protein | Translocation domain | Seth et al., 2003, J Virol 77(11) |
| | | 6520-6527 |
| Foamy virus | Translocation domain | Picard-Maureau et al., 2003, J |
| envelope | | Virol. 77(8), 4722-4730 |
| glycoprotein | | |

[0201] The polypeptides of the present invention may further comprise a translocation facilitating domain. Said domain facilitates delivery of the non-cytotoxic protease into the cytosol of the target cell and are described, for example, in WO 08/008,803 and WO 08/008,805, each of which is herein incorporated by reference thereto.

[0202] By way of example, suitable translocation facilitating domains include an enveloped virus fusogenic peptide domain, for example, suitable fusogenic peptide domains include influenzavirus fusogenic peptide domain (eg. influenza A virus fusogenic peptide domain of 23 amino acids), alphavirus fusogenic peptide domain (eg. Semliki Forest virus fusogenic peptide domain of 26 amino acids), vesiculovirus fusogenic peptide domain (eg. vesicular stomatitis virus fusogenic peptide domain of 21 amino acids), respirovirus fusogenic peptide domain (eg. Sendai virus fusogenic peptide domain of 25 amino acids), morbiliivirus fusogenic peptide domain (eg. Canine distemper virus fusogenic peptide domain of 25 amino acids), avulavirus fusogenic peptide domain (eg. Newcastle disease virus fusogenic peptide domain of 25 amino acids), henipavirus fusogenic peptide domain (eg. Hendra virus fusogenic peptide domain of 25 amino acids), metapneumovirus fusogenic peptide domain (eg. Human metapneumovirus fusogenic peptide domain of 25 amino acids) or spumavirus fusogenic peptide domain such as simian foamy virus fusogenic peptide domain; or fragments or variants thereof.

[0203] By way of further example, a translocation facilitating domain may comprise a Clostridial toxin H_{CN} domain or a fragment or variant thereof. In more detail, a Clostridial toxin H_{CN} translocation facilitating domain may have a length of at least 200 amino acids, at least 225 amino acids, at least 250 amino acids, at least 275 amino acids. In this regard, a Clostridial toxin H_{CN} translocation facilitating domain preferably has a length of at most 200 amino acids, at most 225 amino acids, at most 250 amino acids, or at most 275 amino acids. Specific (reference) examples include:

| | |
|---|---|
| Botulinum type A neurotoxin | amino acid residues (872-1110) |
| Botulinum type B neurotoxin | amino acid residues (859-1097) |
| Botulinum type C neurotoxin | amino acid residues (867-1111) |
| Botulinum type D neurotoxin | amino acid residues (863-1098) |
| Botulinum type E neurotoxin | amino acid residues (846-1085) |
| Botulinum type F neurotoxin | amino acid residues (865-1105) |
| Botulinum type G neurotoxin | amino acid residues (864-1105) |
| Tetanus neurotoxin | amino acid residues (880-1127) |

[0204] The above sequence positions may vary a little according to serotype/sub-type, and further examples of suitable (reference) Clostridial toxin H_{CN} domains include:

| | |
|---|---|
| Botulinum type A neurotoxin | amino acid residues (874-1110) |
| Botulinum type B neurotoxin | amino acid residues (861-1097) |
| Botulinum type C neurotoxin | amino acid residues (869-1111) |
| Botulinum type D neurotoxin | amino acid residues (865-1098) |
| Botulinum type E neurotoxin | amino acid residues (848-1085) |
| Botulinum type F neurotoxin | amino acid residues (867-1105) |
| Botulinum type G neurotoxin | amino acid residues (866-1105) |
| Tetanus neurotoxin | amino acid residues (882-1127) |

[0205] Any of the above-described facilitating domains may be combined with any of the previously described translocation domain peptides that are suitable for use in the present invention. Thus, by way of example, a non-clostridial facilitating domain may be combined with non-clostridial translocation domain peptide or with clostridial translocation domain peptide. Alternatively, a Clostridial toxin H_{CN} translocation facilitating domain may be combined with a non-clostridal translocation domain peptide. Alternatively, a Clostridial toxin H_{CN} facilitating domain may be combined or with a clostridial translocation domain peptide, examples of which include:

| | |
|---|---|
| Botulinum type A neurotoxin | amino acid residues (449-1110) |
| Botulinum type B neurotoxin | amino acid residues (442-1097) |
| Botulinum type C neurotoxin | amino acid residues (450-1111) |
| Botulinum type D neurotoxin | amino acid residues (446-1098) |
| Botulinum type E neurotoxin | amino acid residues (423-1085) |
| Botulinum type F neurotoxin | amino acid residues (440-1105) |
| Botulinum type G neurotoxin | amino acid residues (447-1105) |
| Tetanus neurotoxin | amino acid residues (458-1127) |

### Sequence Homology:

[0206] Any of a variety of sequence alignment methods can be used to determine percent identity, including, without limitation, global methods, local methods and hybrid methods, such as, e.g., segment approach methods. Protocols to determine percent identity are routine procedures within the scope of one skilled in the art. Global methods align sequences from the beginning to the end of the molecule and determine the best alignment by adding up scores of individual residue pairs and by imposing gap penalties. Non-limiting methods include, e.g., CLUSTAL W, see, e.g., Julie D. Thompson et al., CLUSTAL W: Improving the Sensitivity of Progressive Multiple Sequence Alignment Through Sequence Weighting, Position-Specific Gap Penalties and Weight Matrix Choice, 22(22) Nucleic Acids Research 4673-4680 (1994); and iterative refinement, see, e.g., Osamu Gotoh, Significant Improvement in Accuracy of Multiple Protein. Sequence Alignments by Iterative Refinement as Assessed by Reference to Structural Alignments, 264(4) J. Mol. Biol. 823-838 (1996). Local methods align sequences by identifying one or more conserved motifs shared by all of the input sequences. Non-limiting methods include, e.g., Match-box, see, e.g., Eric Depiereux and Ernest Feytmans, Match-Box: A Fundamentally New Algorithm for the Simultaneous Alignment of Several Protein Sequences, 8(5) CABIOS 501-509 (1992); Gibbs sampling, see, e.g., C. E, Lawrence et al., Detecting Subtle Sequence Signals: A Gibbs Sampling Strategy for Multiple Alignment, 262(5131) Science 208-214 (1993); Align-M, see, e.g., Ivo Van Walle et al., Align-M—A New Algorithm for Multiple Alignment of Highly Divergent Sequences, 20(9) Bioinformatics: 1428-1435 (2004).

[0207] Thus, percent sequence identity is determined by conventional methods. See, for example, Altschul et al., Bull. Math. Bio. 48: 603-16, 1986 and Henikoff and Henikoff, Proc. Natl. Acad. Sci. USA 89:10915-19, 1992. Briefly, two amino acid sequences are aligned to optimize the alignment scores using a gap opening penalty of 10, a gap extension penalty of 1, and the “blosum 62” scoring matrix of Henikoff and Henikoff (ibid.) as shown below (amino acids are indicated by the standard one-letter codes).

Alignment scores for determining sequence identity

| | A | R | N | D | C | Q | E | G | H | I | L | K | M | F | P | S | T | W | Y | V |
|---|---|---|---|---|---|---|---|---|---|---|---|---|---|---|---|---|---|---|---|---|
| A | 4 | | | | | | | | | | | | | | | | | | | |
| R | −1 | 5 | | | | | | | | | | | | | | | | | | |
| N | −2 | 0 | 6 | | | | | | | | | | | | | | | | | |
| D | −2 | −2 | 1 | 6 | | | | | | | | | | | | | | | | |
| C | 0 | −3 | −3 | −3 | 9 | | | | | | | | | | | | | | | |
| Q | −1 | 1 | 0 | 0 | −3 | 5 | | | | | | | | | | | | | | |
| E | −1 | 0 | 0 | 2 | −4 | 2 | 5 | | | | | | | | | | | | | |
| G | 0 | −2 | 0 | −1 | −3 | −2 | −2 | 6 | | | | | | | | | | | | |
| H | −2 | 0 | 1 | −1 | −3 | 0 | 0 | −2 | 8 | | | | | | | | | | | |
| I | −1 | −3 | −3 | −3 | −1 | −3 | −3 | −4 | −3 | 4 | | | | | | | | | | |
| L | −1 | −2 | −3 | −4 | −1 | −2 | −3 | −4 | −3 | 2 | 4 | | | | | | | | | |
| K | −1 | 2 | 0 | −1 | −3 | 1 | 1 | −2 | −1 | −3 | −2 | 5 | | | | | | | | |
| M | −1 | −1 | −2 | −3 | −1 | 0 | −2 | −3 | −2 | 1 | 2 | −1 | 5 | | | | | | | |
| F | −2 | −3 | −3 | −3 | −2 | −3 | −3 | −3 | −1 | 0 | 0 | −3 | 0 | 6 | | | | | | |
| P | −1 | −2 | −2 | −1 | −3 | −1 | −1 | −2 | −2 | −3 | −3 | −1 | −2 | −4 | 7 | | | | | |
| S | 1 | −1 | 1 | 0 | −1 | 0 | 0 | 0 | −1 | −2 | −2 | 0 | −1 | −2 | −1 | 4 | | | | |
| T | 0 | −1 | 0 | −1 | −1 | −1 | −1 | −2 | −2 | −1 | −1 | −1 | −1 | −2 | −1 | 1 | 5 | | | |
| W | −3 | −3 | −4 | −4 | −2 | −2 | −3 | −2 | −2 | −3 | −2 | −3 | −1 | 1 | −4 | −3 | −2 | 11 | | |
| Y | −2 | −2 | −2 | −3 | −2 | −1 | −2 | −3 | 2 | −1 | −1 | −2 | −1 | 3 | −3 | −2 | −2 | 2 | 7 | |
| V | 0 | −3 | −3 | −3 | −1 | −2 | −2 | −3 | −3 | 3 | 1 | −2 | 1 | −1 | −2 | −2 | 0 | −3 | −1 | 4 |

[0208] The percent identity is then calculated as:

$$\frac{Total number of identical matches}{[ \begin{matrix}length of the longer sequence plus the number \\ of gaps intrduced into the longer sequence \\ in order to align the two sequences \end{matrix} ]} \times 100$$

[0209] Substantially homologous polypeptides are characterized as having one or more amino acid substitutions, deletions or additions. These changes are preferably of a minor nature, that is conservative amino acid substitutions (see below) and other substitutions that do not significantly affect the folding or activity of the polypeptide; small deletions, typically of one to about 30 amino acids; and small amino- or carboxyl-terminal extensions, such as an amino-terminal methionine residue, a small linker peptide of up to about 20-25 residues, or an affinity tag.

### Conservative Amino Acid Substitutions

[0210] Basic: arginine
[0211] lysine
[0212] histidine
   Acidic: glutamic acid
[0213] aspartic acid
   Polar: glutamine
[0214] asparagine
   Hydrophobic: leucine
[0215] isoleucine
[0216] valine
   Aromatic: phenylalanine
[0217] tryptophan
[0218] tyrosine
   Small: glycine
[0219] alanine
[0220] serine
[0221] threonine
[0222] methionine

[0223] In addition to the 20 standard amino acids, non-standard amino acids (such as 4-hydroxyproline, 6-N-methyl lysine, 2-aminoisobutyric acid, isovaline and α-methyl serine) may be substituted for amino acid residues of the polypeptides of the present invention. A limited number of non-conservative amino acids, amino acids that are not encoded by the genetic code, and unnatural amino acids may be substituted for clostridial polypeptide amino acid residues. The polypeptides of the present invention can also comprise non-naturally occurring amino acid residues.

[0224] Non-naturally occurring amino acids include, without limitation, trans-3-methylproline, 2,4-methano-proline, cis-4-hydroxyproline, trans-4-hydroxy-proline, N-methylglycine, allo-threonine, methyl-threonine, hydroxy-ethylcysteine, hydroxyethylhomo-cysteine, nitro-glutamine, homoglutamine, pipecolic acid, tert-leucine, norvaline, 2-azaphenylalanine, 3-azaphenyl-alanine, 4-azaphenyl-alanine, and 4-fluorophenylalanine. Several methods are known in the art for incorporating non-naturally occurring amino acid residues into proteins. For example, an in vitro system can be employed wherein nonsense mutations are suppressed using chemically aminoacylated suppressor tRNAs. Methods for synthesizing amino acids and aminoacylating tRNA are known in the art. Transcription and translation of plasmids containing nonsense mutations is carried out in a cell free system comprising an E. coli S30 extract and commercially available enzymes and other reagents. Proteins are purified by chromatography. See, for example, Robertson et al., J. Am. Chem. Soc. 113:2722, 1991; Ellman et al., Methods Enzymol. 202:301, 1991; Chung et al., Science 259:806-9, 1993; and Chung et al., Proc. Natl. Acad. Sci. USA 90:10145-9, 1993). In a second method, translation is carried out in Xenopus oocytes by microinjection of mutated mRNA and chemically aminoacylated suppressor tRNAs (Turcatti et al., J. Biol. Chem. 271:19991-8, 1996). Within a third method, E. coli cells are cultured in the absence of a natural amino acid that is to be replaced (e.g., phenylalanine) and in the presence of the desired non-naturally occurring amino acid(s) (e.g., 2-azaphenylalanine, 3-azaphenylalanine, 4-azaphenylalanine, or 4-fluorophenylalanine). The non-naturally occurring amino acid is incorporated into the polypeptide in place of its natural counterpart. See, Koide et al., Biochem. 33:7470-6, 1994. Naturally occurring amino acid residues can be converted to non-naturally occurring species by in vitro chemical modification. Chemical modification can be combined with site-directed mutagenesis to further expand the range of substitutions (Wynn and Richards, Protein Sci. 2:395-403, 1993).

[0225] A limited number of non-conservative amino acids, amino acids that are not encoded by the genetic code, non-naturally occurring amino acids, and unnatural amino acids may be substituted for amino acid residues of polypeptides of the present invention.

[0226] Essential amino acids in the polypeptides of the present invention can be identified according to procedures known in the art, such as site-directed mutagenesis or alanine-scanning mutagenesis (Cunningham and Wells, Science 244: 1081-5, 1989). Sites of biological interaction can also be determined by physical analysis of structure, as determined by such techniques as nuclear magnetic resonance, crystallography, electron diffraction or photoaffinity labeling, in conjunction with mutation of putative contact site amino acids. See, for example, de Vos et al., Science 255:306-12, 1992; Smith et al., J. Mol. Biol. 224:899-904, 1992; Wlodaver et al., FEBS Lett. 309:59-64, 1992. The identities of essential amino acids can also be inferred from analysis of homologies with related components (e.g. the translocation or protease components) of the polypeptides of the present invention.

[0227] Multiple amino acid substitutions can be made and tested using known methods of mutagenesis and screening, such as those disclosed by Reidhaar-Olson and Sauer (Science 241:53-7, 1988) or Bowie and Sauer (Proc. Natl. Acad. Sci. USA 86:2152-6, 1989). Briefly, these authors disclose methods for simultaneously randomizing two or more positions in a polypeptide, selecting for functional polypeptide, and then sequencing the mutagenized polypeptides to determine the spectrum of allowable substitutions at each position. Other methods that can be used include phage display (e.g., Lowman et al., Biochem. 30:10832-7, 1991; Ladner et al., U.S. Pat. No. 5,223,409; Huse, WIPO Publication WO 92/06204) and region-directed mutagenesis (Derbyshire et al., Gene 46:145, 1986; Ner et al., DNA 7:127, 1988).

[0228] Multiple amino acid substitutions can be made and tested using known methods of mutagenesis and screening, such as those disclosed by Reidhaar-Olson and Sauer (Science 241:53-7, 1988) or Bowie and Sauer (Proc. Natl. Acad. Sci. USA 86:2152-6, 1989). Briefly, these authors disclose methods for simultaneously randomizing two or more positions in a polypeptide, selecting for functional polypeptide, and then sequencing the mutagenized polypeptides to determine the spectrum of allowable substitutions at each position. Other methods that can be used include phage display (e.g., Lowman et al., Biochem. 30:10832-7, 1991; Ladner et al., U.S. Pat. No. 5,223,409; Huse, WIPO Publication WO 92/06204) and region-directed mutagenesis (Derbyshire et al., Gene 46:145, 1986; Ner et al., DNA 7:127, 1988).

[0229] There now follows a brief description of the Figures, which illustrate aspects and/or embodiments of the present invention.

[0230] FIG. 1—Purification of a LH_{N}/C-Rat GHRP Fusion Protein

[0231] Using the methodology outlined in Example 3, a LH_{N}/C-rGHRP fusion protein was purified from E. coli BL21 (DE3) cells. Briefly, the soluble products obtained following cell disruption were applied to a nickel-charged affinity capture column. Bound proteins were eluted with 200 mM imidazole, treated with Factor Xa to activate the fusion protein and then re-applied to a second nickel-charged affinity capture column. Samples from the purification procedure were assessed by SDS-PAGE. Lane 1: Molecular mass markers (kDa), lane 2: Clarified crude cell lysate, lanes 3-5: First nickel chelating Sepharose column eluant (0.1 mg/ml), lanes 6-8: First nickel chelating Sepharose column eluant (0.01 mg/ml), lane 9: Factor Xa digested protein under non-reducing conditions, lane 10: Purified LH_{N}/C-rGHRP under non-reducing conditions, lane 11: Purified LH_{N}/C-rGHRP under reduced conditions.

[0232] FIG. 2—Purification of LH_{N}/C-Rat LEP116-122 Fusion Protein

[0233] Using the methodology outlined in Example 3, a LH_{N}/C-Rat LEP116-122 fusion protein was purified from E. coli BL21 (DE3) cells. Briefly, the soluble products obtained following cell disruption were applied to a nickel-charged affinity capture column. Bound proteins were eluted with 200 mM imidazole, treated with Factor Xa to activate the fusion protein and then re-applied to a second nickel-charged affinity capture column. Samples from the purification procedure were assessed by SDS-PAGE. Lane 1: First nickel chelating Sepharose column eluant, Lane 2: First nickel chelating Sepharose column eluant treated with Factor Xa under non-reducing conditions, Lane 3: First nickel chelating Sepharose column eluant treated with Factor Xa under reducing conditions, lanes 4-6: Second nickel chelating Sepharose column eluant under non-reducing conditions, lane 7-9: Second nickel chelating Sepharose column eluant under reducing conditions, lane 10: Molecular mass markers (kDa),

[0234] FIG. 3—GH Secretion from Differentiated MtT/S Treated with Various LHn

[0235] Using the methodology outlined in the experimental data section: after differentiation of the MtT/S cells with 10⁻⁸M corticosterone the cells were treated during 48 h with one of the following molecule: LHnB (100 nM), LHnC (100 nM) or LHnD (100 nM). The cells were then submitted to a secretion assay using Krebs Medium containing 40 mM KCl for 10 minutes.

[0236] FIG. 4—Purification of LH_{N}/A-GHRH Fusion Protein

[0237] Using the methodology outlined in Example 3, a LH_{N}/A-GHRH fusion protein was purified from E. coli BL21 (DE3) cells. Briefly, the soluble products obtained following cell disruption were applied to a nickel-charged affinity capture column. Bound proteins were eluted with 200 mM imidazole, treated with Factor Xa to activate the fusion protein and then re-applied to a second nickel-charged affinity capture column. Samples from the purification procedure were assessed by SDS-PAGE. Lane 1: Molecular mass markers (kDa), Lane 2: Soluble fraction, Lane 3: First nickel chelating Sepharose column eluant treated with Factor Xa under non-reducing conditions, Lane 4: Second nickel chelating Sepharose column load under non-reducing conditions, Lane 5: Second nickel chelating Sepharose column eluant under non-reducing conditions, Lane 6: Final sample under non reducing conditions Lane 7: Final sample under reducing condition.

[0238] FIG. 5—Purification of LH_{N}/C-GHRH Fusion Protein.

[0239] Using the methodology outlined in Example 3, a LH_{N}/A-GHRH fusion protein was purified from E. coli BL21 (DE3) cells. Briefly, the soluble products obtained following cell disruption were applied to a nickel-charged affinity capture column. Bound proteins were eluted with 200 mM imidazole, treated with Factor Xa to activate the fusion protein and then re-applied to a second nickel-charged affinity capture column. Samples from the purification procedure were assessed by SDS-PAGE. Lane 1: Molecular mass markers (kDa), Lane 2: Soluble fraction, Lane 3: First nickel chelating Sepharose column eluant treated with Factor Xa under non-reducing conditions, Lane 4: Second nickel chelating Sepharose column load under non-reducing conditions, Lane 5: Second nickel chelating Sepharose column eluant under non-reducing conditions, Lane 6: Final sample under non reducing conditions Lane 7: Final sample under reducing condition.

[0240] FIG. 6—LH_{N}/A-GHRH and LH_{N}/C-GHRH Final Product.

[0241] Using the methodology outlined in Example 3, LH_{N}/A-GHRH and LH_{N}/C-GHRH fusion proteins was purified from E. coli BL21 (DE3) cells. Samples from the purification procedure were assessed by SDS-PAGE. Lane 1: Molecular mass markers (kDa), Lane 2: Final sample (LH_{N}/A-GHRH) under non reducing conditions, Lane 3: Final sample (LH_{N}/A-GHRH) under reducing condition, Lane 4: Final sample (LH_{N}/C-GHRH) under non-reducing conditions, Lane 5: Final sample (LH_{N}/C-GHRH) under reducing condition.

[0242] FIG. 7—Activity of CP-GHRH-LHD on Rat IGF-1 Levels In Vivo

[0243] FIG. 7 shows the effects of i.v. administration of CP-GHRH-LHD (SXN101000) on rat IGF-1 levels 5 days after treatment compared to a vehical only control.

[0244] FIG. 8—Activity of CP-GHRH-LHD on Rat IGF-1 Levels In Vivo

[0245] FIG. 8 shows the effects of i.v. administration of CP-GHRH-LHD (SXN101000) on rat IGF-1 levels on day 1 to 8 days after treatment compared to a vehical only control. Due to the blocking of the cannula on days 9 and 10 have too few an n number to be considered.

[0246] FIG. 9—Activity of CP-GHRH-LHD on Rat GH Levels In Vivo

[0247] FIG. 9b shows the effects of i.v. administration of CP-GHRH-LHD (SXN101000) on rat GH levels on day 5 days after treatment compared to a vehical only control (FIG. 9a) and Octreotide infusion (FIG. 9c).

### EXAMPLES

[0248] Example 1 Preparation of a LH_{N}/C backbone construct
[0249] Example 2 Construction of LH_{N}/C-human GHRP
[0250] Example 3 Expression and purification of a LH_{N}/C-human GHRP fusion
[0251] Example 4 Construction of LH_{N}/D-CP-qGHRH29 fusion protein
[0252] Example 5 Expression and purification of a LH_{N}/D-CP-qGHRH29 fusion protein
[0253] Example 6 Chemical conjugation of LH_{N}/A to SST TM
[0254] Example 7 Method for treating colorectal cancer
[0255] Example 8 Method for treating breast cancer
[0256] Example 9 Method for treating prostate cancer
[0257] Example 10 Method for treating small cell lung cancer
[0258] Example 11 Method for treating colorectal cancer
[0259] Example 12 Method for treating small cell lung cancer
[0260] Example 13 Method for treating prostate cancer
[0261] Example 14 Method for treating small cell lung cancer
[0262] Example 15 Method for treating breast cancer
[0263] Example 16 Method for treating colorectal cancer
[0264] Example 17 Method for treating prostate cancer
[0265] Example 18 Method for treating small cell lung cancer
[0266] Example 19 Method for treating colorectal cancer
[0267] Example 20 Method for treating breast cancer
[0268] Example 21 Method for treating colorectal cancer
[0269] Example 22 Method for treating prostate cancer
[0270] Example 23 Method for treating breast cancer
[0271] Example 24 Method for treating small cell lung cancer
[0272] Example 25 Method for treating colorectal cancer
[0273] Example 26 Method for treating prostate cancer
[0274] Example 27 Method for treating breast cancer
[0275] Example 28 Method for treating small cell lung cancer
[0276] Example 29 Binding, secretion and in vivo assay
[0277] Example 30 Method for treating non-small cell lung cancer
[0278] Example 31 Method for treating non-small cell lung cancer
[0279] Example 32 Method for treating non-small cell lung cancer
[0280] Example 33 Method for treating breast cancer
[0281] Example 34 Method for treating small cell lung cancer
[0282] Example 35 Method for treating colorectal cancer
[0283] Example 36 Method for treating prostate cancer
[0284] Example 37 Activity of CP-GHRH-LHD on rat IGF-1 levels in vivo
[0285] Example 38 Activity of CP-GHRH-LHD on rat IGF-1 levels in vivo
[0286] Example 39 Activity of CP-GHRH-LHD on rat growth hormone levels in vivo

### SEQ ID NOs

[0287] Where an initial Met amino acid residue or a corresponding initial codon is indicated in any of the following SEQ ID NOs, said residue/codon is optional.
[0288] SEQ ID1 DNA sequence of LH_{N}/A
[0289] SEQ ID2 DNA sequence of LH_{N}/B
[0290] SEQ ID3 DNA sequence of LH_{N}/C
[0291] SEQ ID4 DNA sequence of LH_{N}/D
[0292] SEQ ID5 DNA sequence of IgA-H_{N}tet
[0293] SEQ ID6 DNA sequence of the human GHRP linker
[0294] SEQ ID7 DNA sequence of the human GHRP-C fusion
[0295] SEQ ID8 Protein sequence of the human GHRP-C fusion
[0296] SEQ ID9 Protein sequence of the human GHRH-D fusion
[0297] SEQ ID10 Protein sequence of the human EGF-D fusion
[0298] SEQ ID11 Protein sequence of the human NGF-D GS35 fusion
[0299] SEQ ID12 Protein sequence of the human LEP116-122-D fusion
[0300] SEQ ID13 Protein sequence of the human VIP-D fusion
[0301] SEQ ID14 Protein sequence of the human LEP116-122-C fusion
[0302] SEQ ID15 Protein sequence of the human IGF1-C fusion
[0303] SEQ ID16 Protein sequence of the human SST14-C GS35 fusion
[0304] SEQ ID17 Protein sequence of the human GHRP-D fusion
[0305] SEQ ID18 Protein sequence of the human IGF1-D fusion
[0306] SEQ ID19 Protein sequence of the human NGF-C fusion
[0307] SEQ ID20 Protein sequence of the human SST14-D GS20 fusion
[0308] SEQ ID21 Protein sequence of the human VIP-C fusion
[0309] SEQ ID22 Protein sequence of the human ghrelin-A fusion
[0310] SEQ ID23 Protein sequence CP-hGHRH29 N8A K12N M27L-LHD fusion
[0311] SEQ ID24 Protein sequence N-terminal-hGHRH29 N8A M27L-LHD fusion
[0312] SEQ ID25 Protein sequence of the IgA-H_{N}tet-SST14 Fusion
[0313] SEQ ID26 Protein sequence of the IgA-H_{N}tet-GHRP Fusion
[0314] SEQ ID27 Protein sequence of the human ghrelin S3W-A fusion
[0315] SEQ ID28 Protein sequence of the SST28-D fusion
[0316] SEQ ID29 Protein sequence of the GRP-D fusion
[0317] SEQ ID30 Protein sequence of the GRP-B fusion
[0318] SEQ ID31 DNA sequence of the CP-qGHRH29 linker
[0319] SEQ ID32 DNA sequence of the CP-qGHRH29-D fusion
[0320] SEQ ID33 Protein sequence of the CP-qGHRH29-D fusion
[0321] SEQ ID34 Protein sequence of the CP-qGHRH-A fusion
[0322] SEQ ID35 Protein sequence of the CP-qGHRH-C fusion
[0323] SEQ ID36 Protein sequence of the CP-qGHRH-D fusion
[0324] SEQ ID37 Protein sequence of the CP-qGHRH-D N10-PL5 fusion
[0325] SEQ ID38 Protein sequence of the CP-qGHRH-D N10-HX12 fusion
[0326] SEQ ID39 Protein sequence of the CP-SST28-D fusion
[0327] SEQ ID40 Protein sequence of the CP-SST14-D fusion
[0328] SEQ ID41 Protein sequence of the IgA-CP-SST14-H_{N}tet fusion
[0329] SEQ ID42 Protein sequence of the CP-UTS-A fusion
[0330] SEQ ID43 Protein sequence of the CP-hTGF-B GS10-NS fusion
[0331] SEQ ID44 Protein sequence of the CP-hTGF-B GS10-GS20 fusion
[0332] SEQ ID45 Protein sequence of LH_{N}/A
[0333] SEQ ID46 Protein sequence of LH_{N}/B
[0334] SEQ ID47 Protein sequence of LH_{N}/C
[0335] SEQ ID48 Protein sequence of LH_{N}/D
[0336] SEQ ID49 Protein sequence of IgA-H_{N}tet
[0337] SEQ ID50 Synthesised Octreotide peptide
[0338] SEQ ID51 Synthesised GHRH agonist peptide
[0339] SEQ ID52 Synthesised GHRH antagonist peptide
[0340] SEQ ID53 Protein sequence of the CP-MCH-D fusion
[0341] SEQ ID54 Protein sequence of the KISS-D fusion
[0342] SEQ ID55 Protein sequence of the PrRP-A fusion
[0343] SEQ ID56 Protein sequence of CP-CRH-C fusion
[0344] SEQ ID57 Protein sequence of the CP-HS_GHRH_{—}1-27-LHD fusion
[0345] SEQ ID58 Protein sequence of the CP-HS_GHRH_{—}1-28-LHD fusion
[0346] SEQ ID59 Protein sequence of the CP-HS_GHRH_{—}1-29-LHD fusion
[0347] SEQ ID60 Protein sequence of the CP-HS_GHRH_{—}1-44-LHD fusion
[0348] SEQ ID61 Protein sequence of the CP-HS_GHRH_{—}1-40-LHD fusion
[0349] SEQ ID62 Protein sequence of the CP-HS_GHRH_Ala9-LHD fusion
[0350] SEQ ID63 Protein sequence of the CP-HS_GHRH_Ala22-LHD fusion
[0351] SEQ ID64 Protein sequence CP-HS_GHRH_Ala8_Lys11_{—}1-29-LHD fusion
[0352] SEQ ID65 Protein CP-HS_GHRH_Ala8_Lys11_Arg12_{—}1-29-LHD fusion
[0353] SEQ ID66 Protein sequence CP-HS_GHRH_Ala8_Asn11_{—}1-29-LHD fusion
[0354] SEQ ID67 Protein sequence CP-HS_GHRH_Ala8_Lys20_{—}1-29-LHD fusion
[0355] SEQ ID68 Protein CP-HS_GHRH_Ala8_Lys11_Lys20_{—}1-29-LHD fusion
[0356] SEQ ID69 Protein sequence CP-HS_GHRH_Ala8_Asn20_{—}1-29-LHD fusion
[0357] SEQ ID70 Protein sequence CP-HS_GHRH_Ala8_Asn12_{—}1-29-LHD fusion
[0358] SEQ ID71 Protein sequence CP-HS_GHRH_Ala8_Asn21_{—}1-29-LHD fusion
[0359] SEQ ID72 Protein sequence CP-HS_GHRH_Ala8_Glu_{—}7_{—}1-29-LHD fusion
[0360] SEQ ID73 Protein sequence CP-HS_GHRH_Ala8_Glu_{—}10_{—}1-29LHD fusion
[0361] SEQ ID74 Protein CP-HS_GHRH Ala8 Glu_{—}13_{—}1-29-LHD fusion
[0362] SEQ ID75 Protein sequence of the CP-HS_GHRH_Ala8-LHD fusion
[0363] SEQ ID76 Protein sequence of the CP-HS_GHRH_Glu8_{—}1-29-LHD fusion
[0364] SEQ ID77 Protein sequence of the CP-HS_GHRH_Ala15_{—}1-27-LHD fusion
[0365] SEQ ID78 Protein sequence of the CP-HS_GHRH_Ala15-LHD fusion
[0366] SEQ ID79 Protein sequence CP-HS_GHRH_Ala8_Ala15_{—}1-29-LHD fusion
[0367] SEQ ID80 Protein CP-HS_GHRH_Ala8_{—}9_{—}5_{—}22_{—}27-LHD fusion
[0368] SEQ ID81 Protein sequence CP-HS_GHRH_Ala8_{—}9_{—}15_{—}22-LHD fusion
[0369] SEQ ID82 Protein sequence CP-HS_GHRH_HVQAL_{—}1-32-LHD fusion
[0370] SEQ ID83 Protein sequence CP-HS_GHRH_HVSAL1-29-LHD fusion
[0371] SEQ ID84 Protein sequence CP-HS_GHRH_HVTAL1-29-LHD fusion
[0372] SEQ ID85 Protein sequence CP-HS_GHRH_QALN-LHD fusion
[0373] SEQ ID86 Protein sequence CP-HS_GHRH_QAL-LHD fusion
[0374] SEQ ID87 Protein sequence CP-hGHRH29 N8A M27L-LHD fusion
[0375] SEQ ID88 Protein sequence LHD CP Human GHRH 1-40 fusion
[0376] SEQ ID89 Protein sequence LHD CP Human GHRH 1-44 fusion
[0377] SEQ ID90 Protein sequence LHD CP Human GHRH 1-29 Arg substituted at position 9 fusion
[0378] SEQ ID91 Protein sequence LHD CP Human GHRH1-29 Ala substituted at position 8, Arg substituted at position 9 fusion
[0379] SEQ ID92 Protein sequence LHD CP Human GHRH1-40 Arg substituted at position 9 fusion
[0380] SEQ ID93 Protein sequence LHD CP Human GHRH1-44 Arg substituted at position 9 fusion
[0381] SEQ ID94 Protein sequence LHD CP Human GHRH1-29 Arg substituted at position 14, 15, 16 and 17 fusion
[0382] SEQ ID95 Protein sequence LHD CP Human GHRH1-40 Ala substituted at position 8 fusion
[0383] SEQ ID96 Protein sequence LHC CP Human GHRH 1-40 fusion
[0384] SEQ ID97 Protein sequence LHC CP Human GHRH 1-44 fusion
[0385] SEQ ID98 Protein sequence LHC CP Human GHRH 1-29 Arg substituted at position 9 fusion
[0386] SEQ ID99 Protein sequence LHC CP Human GHRH1-29 Ala substituted at position 8, Arg substituted at position 9 fusion
[0387] SEQ ID100 Protein sequence LHC CP Human GHRH1-40 Arg substituted at position 9 fusion
[0388] SEQ ID101 Protein sequence LHC CP Human GHRH1-44 Arg substituted at position 9 fusion
[0389] SEQ ID102 Protein sequence LHC CP Human GHRH1-29 Arg substituted at position 14, 15, 16 and 17 fusion
[0390] SEQ ID103 Protein sequence LHC CP Human GHRH1-40 Ala substituted at position 8 fusion
[0391] SEQ ID104 Protein sequence of LHD CP qGHRH fusion
[0392] SEQ ID105 DNA sequence of the LHD CP qGHRH fusion

### Example 1

### Preparation of a LH_{N}/C Backbone Construct

[0393] The following procedure creates a clone for use as an expression backbone for multidomain fusion expression. This example is based on preparation of a serotype C based clone (SEQ ID3), though the procedures and methods are equally applicable to all LH_{N} serotypes such as serotype A, B and D (SEQ ID1, 2 and 4) and other protease or translocation domains such as IgA and Tetanus H_{N} (SEQ ID 5) by using the appropriate published sequence for synthesis or DNA template if creating by PCR amplification (SEQ ID5).

### Preparation of Cloning and Expression Vectors

[0394] pCR 4 (Invitrogen) is the chosen standard cloning vector chosen due to the lack of restriction sequences within the vector and adjacent sequencing primer sites for easy construct confirmation. The expression vector is based on the pET (Novagen) expression vector which has been modified to contain the multiple cloning site NdeI-BamHI-SalI-PstI-XbaI-HindIII for construct insertion, a fragment of the expression vector has been removed to create a non-mobilisable plasmid, a variety of different fusion tags have been inserted to increase purification options and an existing XbaI site in the vector backbone has been removed to simplify sub-cloning.

### Preparation of LC/C

[0395] The DNA sequence is designed by back translation of the LC/C amino acid sequence (obtained from freely available database sources such as GenBank (accession number P18640) using one of a variety of reverse translation software tools (for example Backtranslation tool v2.0 (Entelechon)). BamHI/SalI recognition sequences are incorporated at the 5′ and 3′ ends respectively of the sequence maintaining the correct reading frame. The DNA sequence is screened (using software such as SeqBuilder, DNASTAR Inc.) for restriction enzyme cleavage sequences incorporated during the back translation. Any cleavage sequences that are found to be common to those required by the cloning system are removed by the Backtranslation tool from the proposed coding sequence ensuring common E. coli codon usage is maintained. E. coli codon usage is assessed by reference to software programs such as Graphical Codon Usage Analyser (Geneart), and the % GC content and codon usage ratio assessed by reference to published codon usage tables (for example GenBank Release 143, Sep. 13, 2004). This optimised DNA sequence containing the LC/C open reading frame (ORF) is then commercially synthesized (for example by Entelechon, Geneart or Sigma-Genosys) and is provided in the pCR 4 vector.

### Preparation of H_{N}/C Insert

[0396] The DNA sequence is designed by back translation of the H_{N}/C amino acid sequence (obtained from freely available database sources such as GenBank (accession number P18640) using one of a variety of reverse translation software tools (for example Back translation tool v2.0 (Entelechon)). A PstI restriction sequence added to the N-terminus and XbaI-stop codon-HindIII to the C-terminus ensuring the correct reading frame in maintained. The DNA sequence is screened (using software such as SeqBuilder, DNASTAR Inc.) for restriction enzyme cleavage sequences incorporated during the back translation. Any sequences that are found to be common to those required by the cloning system are removed by the Backtranslation tool from the proposed coding sequence ensuring common E. coli codon usage is maintained. E. coli codon usage is assessed by reference to software programs such as Graphical Codon Usage Analyser (Geneart), and the % GC content and codon usage ratio assessed by reference to published codon usage tables (for example GenBank Release 143, Sep. 13, 2004). This optimised DNA sequence is then commercially synthesized (for example by Entelechon, Geneart or Sigma-Genosys) and is provided in the pCR 4 vector.

### Preparation of the Spacer (LC-H_{N} Linker)

[0397] The LC-H_{N} linker can be designed from first principle, using the existing sequence information for the linker as the template. For example, the serotype C linker (in this case defined as the inter-domain polypeptide region that exists between the cysteines of the disulphide bridge between LC and H_{N}) has the sequence HKAIDGRSLYNKTLD containing a native Factor Xa cleavage site. This sequence information is freely available from available database sources such as GenBank (accession number P18640) or Swissprot (accession locus BXC1_CLOBO). For generation of a specific protease cleavage site, the native recognition sequence for Factor Xa can be used in the modified sequence VDAIDGRSLYNKTLQ or an enterokinase activation site can be inserted into the activation loop to generate the sequence such as VDGIITSKTKSDDDDKNKALNLQ. Using one of a variety of reverse translation software tools (for example EditSeq best E. coli reverse translation (DNASTAR Inc.), or Backtranslation tool v2.0 (Entelechon)), the DNA sequence encoding the linker region is determined. BamHI/SalI and PstI/XbaI/stop codon/HindIII restriction enzyme sequences are incorporated at either end, in the correct reading frames. The DNA sequence is screened (using software such as MapDraw, DNASTAR Inc.) for restriction enzyme cleavage sequences incorporated during the back translation. Any sequences that are found to be common to those required by the cloning system are removed manually from the proposed coding sequence ensuring common E. coli codon usage is maintained. E. coli codon usage is assessed by reference to software programs such as Graphical Codon Usage Analyser (Geneart), and the % GC content and codon usage ratio assessed by reference to published codon usage tables (for example GenBank Release 143, Sep. 13, 2004). This optimised DNA sequence is then commercially synthesized (for example by Entelechon, Geneart or Sigma-Genosys) and is provided in the pCR 4 vector.

### Assembly and Confirmation of the Backbone Clone

[0398] Due to the small size, the activation linker must be transferred using a two step process. The pCR-4 linker vector is cleaved with BamHI+SalI combination restriction enzymes and the cleaved linker vector then serves as the recipient for BamHI+SalI restriction enzyme cleaved LC DNA. Once the LC encoding DNA is inserted upstream of the linker DNA, the entire LC-linker DNA fragment can then be isolated and transferred to the pET expression vector MCS. The LC-linker is cut out from the pCR 4 cloning vector using BamHI/PstI restriction enzymes digests. The pET expression vector is digested with the same enzymes but is also treated with antarctic phosphatase as an extra precaution to prevent re-circularisation. The LC-linker and the pET vector backbone are gel purified and the purified insert and vector backbone are ligated together using T4 DNA ligase. The product is transformed with TOP10 cells which are then screened for LC-linker using BamHI/PstI restriction digestion. The process is then repeated for the H_{N} insertion into the PstI/HindIII restriction sites of the pET-LC-linker construct.

[0399] Screening with restriction enzymes is sufficient to ensure the final backbone is correct as all components are already sequenced confirmed during synthesis. However, during the sub-cloning of some components into the backbone, where similar size fragments are being removed and inserted, sequencing of a small region to confirm correct insertion is required.

### Example 2

### Construction of LH_{N}/C-Human GHRP

[0400] The following procedure creates a clone for use as an expression construct for multidomain fusion expression where the targeting moiety (TM) is presented C-terminal to the translocation domains. This example is based on preparation of a human GHRP-C fusion (SEQ ID7), though the procedures and methods are equally applicable to create other protease, translocation and TM fusions, where the TM is C-terminal to the translocation domain.

### Preparation of Spacer-Human GHRP Insert

[0401] For presentation of an GHRP sequence at the C-terminus of the H_{N} domain, a DNA sequence is designed to flank the spacer and targeting moiety (TM) regions allowing incorporation into the backbone clone (SEQ ID3). The DNA sequence can be arranged as BamHI-SalI-PstI-XbaI-spacer-GHRP-stop codon-HindIII (SEQ ID6). The DNA sequence can be designed using one of a variety of reverse translation software tools (for example EditSeq best E. coli reverse translation (DNASTAR Inc.), or Backtranslation tool v2.0 (Entelechon)). Once the TM DNA is designed, the additional DNA required to encode the preferred spacer is created in silico. It is preferred to ensure the correct reading frame is maintained for the spacer, GHRP and restriction sequences and that the XbaI sequence is not preceded by the bases TC, which would result in DAM methylation. The DNA sequence is screened for restriction sequences incorporated and any additional sequences are removed manually from the remaining sequence ensuring common E. coli codon usage is maintained. E. coli codon usage is assessed by reference to software programs such as Graphical Codon Usage Analyser (Geneart), and the % GC content and codon usage ratio assessed by reference to published codon usage tables (for example GenBank Release 143, Sep. 13, 2004). This optimised DNA sequence is then commercially synthesized (for example by Entelechon, Geneart or Sigma-Genosys) and is provided in the pCR 4 vector.

Insertion of Spacer-Human GHRP into Backbone

[0402] In order to create a LC-linker-H_{N}-spacer-GHRP construct (SEQ ID7) using the backbone construct (SEQ ID3) and the newly synthesised pCR 4-spacer-TM vector encoding the GHRP TM (SEQ ID6) a one or two step method can be used; typically the two step method is used when the TM DNA is less than 100 base pairs. Using the one step method the GHRP can be inserted directly into the backbone construct by cutting the pCR 4-spacer-TM vector with XbaI and HindIII restriction enzymes and inserting the TM encoding DNA fragment into a similarly cut pET backbone construct. Using the two-step method the LH_{N} domain is excised from the backbone clone using restriction enzymes BamHI and XbaI and ligated into similarly digested pCR 4-spacer-GHRP vector. This creates an LH_{N}-spacer-GHRP ORF in pCR 4 that can be excised from the vector using restriction enzymes BamHI and HindIII for subsequent ligation into the similarly cleaved pET expression construct. The final construct contains the LC-linker-H_{N}-spacer-GHRP DNA (SEQ ID7) which will result in a fusion protein containing the sequence illustrated in SEQ ID8.

[0403] Screening with restriction enzymes is sufficient to ensure the final backbone is correct as all components are already sequenced confirmed, either during synthesis or following PCR amplification. However, during the sub-cloning of some components into the backbone, where similar size fragments are being removed and inserted, sequencing of a small region to confirm correct insertion is required.

### Example 3

### Expression and Purification of a LH_{N}/C-Human GHRP Fusion

[0404] This example is based on preparation of a human GHRP-C fusion containing the sequence shown in SEQ ID8, where the pET expression vector ORF also encodes a histidine purification tag. These procedures and methods are equally applicable to any C-terminally presented fusion protein of the present invention. Where appropriate, the activation enzyme should be selected to be compatible with the protease activation site within each sequence.

### Expression of LH_{N}/C-GHRP Fusion Protein

[0405] Expression of the LH_{N}/C-GHRP fusion protein is achieved using the following protocol. Inoculate 100 ml of modified TB containing 0.2% glucosamine and 30 μg/ml kanamycin in a 250 ml flask with a single colony from the LH_{N}/C-GHRP expression strain. Grow the culture at 37° C., 225 rpm for 16 hours. Inoculate 1 L of modified TB containing 0.2% glucosamine and 30 μg/ml kanamycin in a 2 L flask with 10 ml of overnight culture. Grow cultures at 37° C. until an approximate OD_{600 nm} of 0.5 is reached at which point reduce the temperature to 16° C. After 1 hour induce the cultures with 1 mM IPTG and grow at 16° C. for a further 16 hours.

### Purification of LH_{N}/C-GHRP Fusion Protein

[0406] Defrost falcon tube containing 35 ml 50 mM HEPES pH 7.2 200 mM NaCl and approximately 10 g of E. coli BL21 (DE3) cell paste. Sonicate the cell paste on ice 30 seconds on, 30 seconds off for 10 cycles at a power of 22 microns ensuring the sample remains cool. Spin the lysed cells at 18 000 rpm, 4° C. for 30 minutes. Load the supernatant onto a 0.1 M NiSO₄ charged Chelating column (20-30 ml column is sufficient) equilibrated with 50 mM HEPES pH 7.2 200 mM NaCl. Using a step gradient of 40 and 100 mM imidazole, wash away the non-specific bound protein and elute the fusion protein with 200 mM imidazole. Dialyse the eluted fusion protein against 5 L of 50 mM HEPES pH 7.2 200 mM NaCl at 4° C. overnight and measure the OD of the dialysed fusion protein. Add 10 mg of Factor Xa per 1 mg fusion protein and incubate at 25° C. static overnight. Load onto a 0.1 M NiSO₄ charged Chelating column (20-30 ml column is sufficient) equilibrated with 50 mM HEPES pH 7.2 200 mM NaCl. Wash column to baseline with 50 mM HEPES pH 7.2 200 mM NaCl. Using a step gradient of 40 and 100 mM imidazole, wash away the non-specific bound protein and elute the fusion protein with 200 mM imidazole. Dialyse the eluted fusion protein against 5 L of 50 mM HEPES pH 7.2 150 mM NaCl at 4° C. overnight and concentrate the fusion to about 2 mg/ml, aliquot sample and freeze at −20° C. Test purified protein using OD, BCA and purity analysis. FIG. 1 demonstrates the purified protein as analysed by SDS-PAGE and FIGS. 2, 4, 5 and 6 demonstrate other purified constructs using this methodology

### Example 4

### Construction of LH_{N}/D-CP-qGHRH29 Fusion Protein

[0407] The following procedure creates a clone for use as an expression construct for multidomain fusion expression where the targeting moiety (TM) is presented centrally between the protease and translocation domains. This example is based on preparation of a CP-qGHRH29-D fusion (SEQ ID33), though the procedures and methods are equally applicable to create any other CP fusion of the present invention, such as SEQ ID NOs: 88, 89, 90, 91, 92, 93, 94, 95, 96, 97, 98, 99, 100, 100, 101, 102, 103, 104.

### Preparation of CP-qGHRH29 Linker Insert

[0408] For presentation of an qGHRH29 sequence at the N-terminus of the H_{N} domain, a DNA sequence is designed to flank the TM with an activation protease site and spacer regions allowing incorporation into the backbone clone (SEQ ID4). The DNA sequence can be arranged as BamHI-SalI-spacer-protease activation site-qGHRH29-spacer-PstI-XbaI-stop codon-Hind III (SEQ ID31). The DNA sequence can be designed using one of a variety of reverse translation software tools (for example EditSeq best E. coli reverse translation (DNASTAR Inc.), or Backtranslation tool v2.0 (Entelechon)). Once the TM DNA is designed, the additional DNA required to encode the preferred spacer is created in silico. It is preferred to ensure the correct reading frame is maintained for the spacers, protease activation site, qGHRH29 and restriction sequences and that the XbaI sequence is not preceded by the bases TC, which would result in DAM methylation. The DNA sequence is screened for restriction sequence incorporated and any additional sequences are removed manually from the remaining sequence ensuring common E. coli codon usage is maintained. E. coli codon usage is assessed by reference to software programs such as Graphical Codon Usage Analyser (Geneart), and the % GC content and codon usage ratio assessed by reference to published codon usage tables (for example GenBank Release 143, Sep. 13, 2004). This optimised DNA sequence is then commercially synthesized (for example by Entelechon, Geneart or Sigma-Genosys) and is provided in the pCR 4 vector.

Insertion of CP-qGHRH29 Linker into Backbone

[0409] In order to create a LC-spacer-activation site-qGHRH29-spacer-H_{N} construct (SEQ ID32) using the backbone construct (SEQ ID4) and the newly synthesised pCR 4-spacer-activation site-TM-spacer vector encoding the human qGHRH29 TM (SEQ ID31), a one or two step method can be used; typically the two step method is used when the TM DNA is less than 100 base pairs. Using the one step method the qGHRH29 linker region can be inserted directly into the backbone construct buy cutting the pCR 4-spacer-activation site-TM-spacer vector with SalI and PstI restriction enzymes and inserting the TM encoding DNA fragment into a similarly cut pET backbone construct. Using the two-step method the LC domain is excised from the backbone clone using restriction enzymes BamHI and SalI and ligated into similarly digested pCR 4-spacer-activation site-TM-spacer vector. This creates a LC-spacer-activation site-qGHRH29-spacer ORF in pCR 4 that can be excised from the vector using restriction enzymes BamHI and PstI for subsequent ligation into similarly pET expression construct. The final construct contains the LC-spacer-activation site-qGHRH29-spacer-H_{N} DNA (SEQ ID32) which will result in a fusion protein containing the sequence illustrated in SEQ ID33. Similarly, by way of example, other CP fusions of the present invention (e.g. SEQ ID NO: 104) may be expressed from the corresponding nucleic acid sequences (e.g. SEQ ID NO: 105).

[0410] Screening with restriction enzymes is sufficient to ensure the final backbone is correct as all components are already sequenced confirmed, either during synthesis or following PCR amplification. However, during the sub-cloning of some components into the backbone, where similar size fragments are being removed and inserted, sequencing of a small region to confirm correct insertion is required.

### Example 5

### Expression/Purification LH_{N}/D-CP-qGHRH29 Fusion Protein

[0411] This example is based on preparation of a LH_{N}/D-CP-qGHRH29 fusion containing the sequence shown in SEQ ID33, where the pET expression vector ORF also encodes a histidine purification tag. These procedures and methods are equally applicable to any CP fusion protein of the present invention, such as SEQ ID NOs: 88, 89, 90, 91, 92, 93, 94, 95, 96, 97, 98, 99, 100, 100, 101, 102, 103, 104. Where appropriate, the activation enzyme should be selected to be compatible with the protease activation site within each sequence.

### Expression of LH_{N}/D-CP-qGHRH29 Fusion Protein

[0412] Expression of the LH_{N}/D-CP-qGHRH29 fusion protein is achieved using the following protocol. Inoculate 100 ml of modified TB containing 0.2% glucosamine and 30 μg/ml kanamycin in a 250 ml flask with a single colony from the LH_{N}/D-CP-qGHRH29 expression strain. Grow the culture at 37° C., 225 rpm for 16 hours. Inoculate 1 L of modified TB containing 0.2% glucosamine and 30 μg/ml kanamycin in a 2 L flask with 10 ml of overnight culture. Grow cultures at 37° C. until an approximate OD_{600 nm} of 0.5 is reached at which point reduce the temperature to 16° C. After 1 hour induce the cultures with 1 mM IPTG and grow at 16° C. for a further 16 hours.

### Purification of LH_{N}/D-CP-qGHRH29 Fusion Protein

[0413] Defrost falcon tube containing 35 ml 50 mM HEPES pH 7.2 200 mM NaCl and approximately 10 g of E. coli BL21 (DE3) cell paste. Sonicate the cell paste on ice 30 seconds on, 30 seconds off for 10 cycles at a power of 22 microns ensuring the sample remains cool. Spin the lysed cells at 18 000 rpm, 4° C. for 30 minutes. Load the supernatant onto a 0.1 M NiSO₄ charged Chelating column (20-30 ml column is sufficient) equilibrated with 50 mM HEPES pH 7.2 200 mM NaCl. Using a step gradient of 40 and 100 mM imidazole, wash away the non-specific bound protein and elute the fusion protein with 200 mM imidazole. Dialyse the eluted fusion protein against 5 L of 50 mM HEPES pH 7.2 200 mM NaCl at 4° C. overnight and measure the OD of the dialysed fusion protein. Add 3.2 μl enterokinase (New England Biolabs) per mg fusion protein and incubate at 25° C. static overnight. Load onto a 0.1 M NiSO₄ charged Chelating column (20-30 ml column is sufficient) equilibrated with 50 mM HEPES pH 7.2 200 mM NaCl. Wash column to baseline with 50 mM HEPES pH 7.2 200 mM NaCl. Using a step gradient of 40 and 100 mM imidazole, wash away the non-specific bound protein and elute the fusion protein with 200 mM imidazole. Dialyse the eluted fusion protein against 5 L of 50 mM HEPES pH 7.2 150 mM NaCl at 4° C. overnight and concentrate the fusion to about 2 mg/ml, aliquot sample and freeze at −20° C. Test purified protein using OD, BCA and purity analysis.

### Example 6

### Chemical Conjugation of LH_{N}/A to SST TM

[0414] The following procedure creates a chemically conjugated molecule containing the LH_{N}/A amino acid sequence (SEQ ID45), prepared from SEQ ID1 using the production method outlined in example 3, and a SST Octreotide peptide which has been chemically synthesised (SEQ ID50). However, the procedures and methods are equally applicable for the conjugational preparation of any polypeptide of the present invention, for example the conjugation of TMs such as SEQ ID51 or SEQ ID52 to a protease/translocation fusion backbone such as those comprising the amino acid sequences SEQ ID45-49.

[0415] The LH_{N}/A protein was buffer exchanged from 50 mM Hepes 150 mM salt into PBSE (100 mM 14.2 g NA2HPO4, 100 mM 5.85 g NaCl, 1 mM EDTANa2 pH 7.5 with 1M HCl) using the Bio-rad PD10 column. This was done by washing one column volume of PBSE through the PD10 column, the protein was then added to the column until no more drops exit the end of the PD10 column. 8 mls of PBSE was then added and 0.5 ml fractions are collected. The collected fractions are the measured using the A₂₈₀ reading and fractions containing protein are pooled. A concentration of 1.55 mg/ml of LH_{N}/A was obtained from the buffer exchange step and this was used to set up the following reactions:

| | |
|---|---|
| LH_{N}/A 1.55 mg/ml | 20 mM SPDP or Sulfo-LC-SPDP |
| A 200 μl | 0 |
| B 200 μl | 4 fold increase 0.62 μl |
| C 200 μl | 8 fold increase 1.24 μl |

[0416] Sample were left to tumble at RT for 3 hours before being passed down another PD10 column to buffer exchange into PBSE and the protein containing fractions pooled. A final concentration of 25 Mm DTT was then added to derivatised protein and then the samples left at room temperature for 10 minutes. A₂₈₀ and A₃₄₃ readings were then taken to work out the ratio of SPDP:LH_{N}/A interaction and the reaction which resulted in a derivatisation ration of between 1 and 3 was used for the peptide conjugation. The SPDP reagent binds to the primary amines of the LH_{N}/A via an N-hydroxysuccinimide (NHS) ester, leaving the sulphydryl-reactive portion to form a disulphide bond to the free SH group on the free cysteine on the synthesised peptide. In this case the peptide sequence is Octreotide which has been synthesised with a free cysteine on the N-terminus (SEQ ID83). The SPDP-derivatised LH_{N}/A was mixed with a 4-fold excess of the Octreotide ligand and the reaction was then left at RT for 90 minutes whilst tumbling. The excess octreotide was then removed using either a PD10 column leaving LH_{N}/A-Octreotide conjugated molecule.

### Example 7

### Method for Treating Colorectal Cancer

[0417] A 59 year old man diagnosed with a stage II colorectal cancer is treated with usual chemotherapy. To improve the effects of the treatment and to prevent metastasis he receives a transphenoidal injection of a GHRH peptide TM polypeptide of the invention (e.g. SEQ ID 9, 23-24, 33-38, 57-87, 88-104). In this case, the polypeptide comprises a protease-translocation fusion backbone of the invention (e.g. BoNT/D protease and translocation domain) chemically conjugated to a GHRH peptide. Within 2 weeks a significant shrinkage of the tumour is observed without appearance of metastasis elsewhere, in correlation with a significant decrease in IGF-1 blood level. The treatment is repeated 3 months later when the IGF-1 blood level starts to rise and 4 weeks later no tumour is observable anymore with the usual detection tools (colonoscopy, CT scan, PET scan, etc.) and the level of carcinoembryonic antigen (CEA) returned to the normal.

### Example 8

### Method for Treating Breast Cancer

[0418] A 52 year old woman diagnosed with a stage II breast cancer is treated with usual chemotherapy. To improve the effects of the treatment and to prevent metastasis she receives a transphenoidal injection of a ghrelin peptide TM fusion protein of the invention (eg. SEQ ID 8, 17, 22, 26-37). Within 4 weeks a significant shrinkage of the tumour is observed without appearance of metastasis elsewhere, in correlation with a significant decrease in IGF-1 blood level. The treatment is repeated 4 months later when the IGF-1 blood level starts to rise again and 6 weeks later no tumour is observable anymore with the usual detection tools (MRI, ultrasound, breast-specific positron emission tomography, mammography, Scintigraphy, etc).

### Example 9

### Method for Treating Prostate Cancer

[0419] A 71 year old man diagnosed with a stage II prostate cancer is treated with hormone therapy. To improve the effects of the treatment and to prevent metastasis he receives an intravenous injection of a GHRH peptide TM fusion protein of the invention (e.g. SEQ ID 9, 23-24, 33-38, 57-87, 88-104). Within 3 weeks a significant shrinkage of the tumour is observed without appearance of metastasis elsewhere, in correlation with a significant decrease in IGF-1 blood level. The treatment is repeated 3 months later when the IGF-1 blood level starts to rise again and 7 weeks later no tumour is observable anymore with the usual detection tools (X-ray, ProstaScint scan, MRI, transrectal ultrasonography, CT scan, etc.) and the levels of PSA came back to normal.

### Example 10

### Method for Treating Small Cell Lung Cancer

[0420] A 62 year old woman diagnosed with a stage II Small cell lung cancer is treated with usual chemotherapy. To improve the effects of the treatment and to prevent metastasis she receives a transphenoidal injection of a IGF-1 peptide TM fusion protein of the invention (eg. SEQ ID 15, 18). Within 4 weeks a significant decrease in the size of the tumour is observed without appearance of metastasis elsewhere, in correlation with a significant decrease in IGF-1 blood level. The treatment is repeated 4 months later when the IGF-1 blood level starts to rise again and 4 weeks later no tumour is observable anymore with the usual detection tools (X-rays, CT scan, bronchoscopy, etc.) or using the usual blood tests recommended for this cancer.

### Example 11

### Method for Treating Colorectal Cancer

[0421] A 53 year old man diagnosed with a stage II colorectal cancer is treated with usual chemotherapy. To improve the effects of the treatment and to prevent metastasis he receives a transphenoidal injection of a CST or SST peptide TM fusion protein of the invention (eg. SEQ ID 16, 20, 25, 28, 39-41). Within 2 weeks a significant shrinkage of the tumour is observed without appearance of metastasis elsewhere, in correlation with a significant decrease in IGF-1 blood level. The treatment is repeated 3 months later when the IGF-1 blood level starts to rise and 4 weeks later no tumour is observable anymore with the usual detection tools (colonoscopy, CT scan, PET scan, etc.) and the level of carcinoembryonic antigen (CEA) returned to the normal.

### Example 12

### Method for Treating Small Cell Lung Cancer

[0422] A 59 year old man diagnosed with a stage I Small cell lung cancer is treated with usual chemotherapy. To improve the effects of the treatment and to prevent metastasis he receives a transphenoidal injection of a urotensin peptide TM fusion protein of the invention (eg. SEQ ID 42). Within 3 weeks a significant decrease in size of the tumour is observed without appearance of metastasis elsewhere, in correlation with a significant decrease in IGF-1 blood level. The treatment is repeated 4 months later when the IGF-1 blood level starts to rise again and 5 weeks later no tumour is observable anymore with the usual detection tools (X-rays, CT scan, MRI, PET scanning, Radionuclide imaging, bronchoscopy, etc.) or using the usual blood tests recommended for this cancer.

### Example 13

### Method for Treating Prostate Cancer

[0423] A 66 year old man diagnosed with a stage IIc prostate cancer is treated with androgen deprivative treatment. To improve the effects of the treatment and to prevent metastasis he receives a intravenous injection of a CST or SST TM fusion protein of the invention (eg. SEQ ID 16, 20, 25, 28, 39-41). Within 10 days a significant shrinkage of the tumour is observed without appearance of metastasis elsewhere, in correlation with a significant decrease in IGF-1 blood level. The treatment is repeated 2 months later when the IGF-1 blood level starts to rise again and 5 weeks later no tumour is observable anymore with the usual detection tools (X-ray, ProstaScint scan, MRI, transrectal ultrasonography, CT scan, etc.) and the levels of PSA came back to normal.

### Example 14

### Method for Treating Small Cell Lung Cancer

[0424] A 60 year old woman diagnosed with a Small Cell Lung Cancer at a limited stage is treated with surgery. To improve the effects of the treatment and to prevent metastasis she receives a transphenoidal injection of a leptin peptide TM fusion protein of the invention (eg. SEQ ID 12, 14). Within 6 weeks no re-appearance of the tumour is observed, in correlation with a significant decrease in IGF-1 blood level. The treatment is repeated 4 months later when the IGF-1 blood level starts to rise again and 8 weeks later no tumour is observable anymore with the usual detection tools (X-rays, CT scan, MRI, PET scanning, Radionuclide imaging, bronchoscopy, etc.) or using the usual blood tests recommended for this cancer.

### Example 15

### Method for Treating Breast Cancer

[0425] A 62 year old woman diagnosed with a stage III breast cancer is treated with radiation. To improve the effects of the treatment and to prevent metastasis she receives a transphenoidal injection of a VIP peptide TM fusion protein of the invention (eg. SEQ ID 13, 21). Within 10 days significant shrinkage of the tumour is observed without appearance of metastasis elsewhere, in correlation with a significant decrease in IGF-1 blood level. The treatment is repeated 2 months later when the IGF-1 blood level starts to rise again and 3 weeks later no tumour is observable anymore with the usual detection tools (MRI, ultrasound, breast-specific positron emission tomography, mammography, Scintigraphy, etc).

### Example 16

### Method for Treating Colorectal Cancer

[0426] A 50 year old woman diagnosed with a stage III colorectal cancer is treated with surgery. To improve the effects of the treatment and to prevent metastasis she receives a transphenoidal injection of an ErbB peptide fusion protein of the invention (eg. SEQ ID 10). Within 8 weeks no reappearance of the tumour is observed and no appearance of metastasis elsewhere, in correlation with a significant decrease in IGF-1 blood level. The treatment is repeated 4 months later when the IGF-1 blood level starts to rise again and 8 weeks later no tumour is observable anymore with the usual detection tools (colonoscopy, CT scan, PET scan, etc.) and the level of carcinoembryonic antigen (CEA) stays normal.

### Example 17

### Method for Treating Prostate Cancer

[0427] A 67 year old man diagnosed with a stage III prostate cancer is treated with external beam radiation plus hormone therapy. To improve the effects of the treatment and to prevent metastasis he receives a transphenoidal injection of a ghrelin (GHRP) peptide TM fusion protein of the invention (eg. SEQ ID 8, 17, 22, 26-37). Within 3 weeks a significant shrinkage of the tumour is observed without appearance of metastasis elsewhere, in correlation with a significant decrease in IGF-1 blood level. The treatment is repeated 4 months later when the IGF-1 blood level starts to rise again and 7 weeks later no tumour is observable anymore with the usual detection tools (X-ray, ProstaScint scan, MRI, transrectal ultrasonography, CT scan, etc.) and the levels of PSA came back to normal.

### Example 18

### Method for Treating Small Cell Lung Cancer

[0428] A 65 year old man diagnosed with a Small Cell Lung Cancer at extensive stage cancer is treated with usual chemotherapy and radiation to treat the brain metastases. To improve the effects of the treatment and to prevent further metastasis he receives an intravenous injection of a GHRH peptide TM fusion protein of the invention (e.g. SEQ ID 9, 23-24, 33-38, 57-87, 88-104). Within 4 weeks a significant shrinkage of the tumour and disappearance of the metastasis is observed without appearance of metastasis elsewhere, in correlation with a significant decrease in IGF-1 blood level. The treatment is repeated 3 months later when the IGF-1 blood level starts to rise again and 8 weeks later no tumour is observable anymore with the usual detection tools (X-rays, CT scan, MRI, PET scanning, Radionuclide imaging, bronchoscopy, etc.) or using the usual blood tests recommended for this cancer.

### Example 19

### Method for Treating Colorectal Cancer

[0429] A 66 year old man diagnosed with a stage II colorectal cancer is treated with surgery. To improve the effects of the treatment and to prevent metastasis he receives a transphenoidal injection of an IGF-1 peptide TM fusion protein of the invention (eg. SEQ ID 15, 18). In the next three months no reappearance of the tumour is observed and no metastasis can be detected elsewhere, this is in correlation with a significant decrease in IGF-1 blood level. The treatment is repeated 4 months later when the IGF-1 blood level starts to rise again and 6 months later no tumour is observable with the usual detection tools (colonoscopy, CT scan, PET scan, etc.) and the level of carcinoembryonic antigen (CEA) stays normal.

### Example 20

### Method for Treating Breast Cancer

[0430] A 54 year old woman diagnosed with a stage IIIb breast cancer is treated with neoadjuvant chemotherapy. To improve the effects of the treatment and to prevent metastasis she receives a transphenoidal injection of am ErbB peptide TM fusion protein of the invention (eg. SEQ ID 10). Within 2 weeks a significant shrinkage of the tumour is observed without appearance of metastasis elsewhere, in correlation with a significant decrease in IGF-1 blood level. She is then submitted to a modified radical mastectomy is with reconstruction. 3 months later when the IGF-1 blood level starts to raise again, a new injection is realized and 8 months later no tumour is observable anymore with the usual detection tools (MRI, ultrasound, breast-specific positron emission tomography, mammography, etc).

### Example 21

### Method for Treating Colorectal Cancer

[0431] A 62 year old woman diagnosed with a stage IV colorectal cancer (3 metastasis observed in the liver) is treated with chemotherapy, by injection in liver arteries. To improve the effects of the treatment and to prevent metastasis elsewhere she receives a transphenoidal injection of a bombesin (GRP) peptide TM fusion protein of the invention (eg. SEQ ID 29-30). Within 2 weeks a significant shrinkage of the tumour and the metastasis is observed without appearance of metastasis elsewhere, in correlation with a significant decrease in IGF-1 blood level. Surgery is then realized to remove the tumour and the metastasis, at the same time. The treatment with the fusion protein is repeated 4 months later when the IGF-1 blood level starts to rise again and 9 months later no tumour is observable anymore with the usual detection tools (colonoscopy, CT scan, PET scan, etc.) and the level of carcinoembryonic antigen (CEA) stays normal.

### Example 22

### Method for Treating Prostate Cancer

[0432] A 73 year old man diagnosed with a stage III prostate cancer is treated with hormone therapy. To improve the effects of the treatment and to prevent metastasis he receives a transphenoidal injection of a VIP peptide TM fusion protein of the invention (eg. SEQ ID 13, 21). Within 6 weeks a significant shrinkage of the tumour is observed without appearance of metastasis elsewhere, in correlation with a significant decrease in IGF-1 blood level. The treatment is repeated 3 months later when the IGF-1 blood level starts to rise again and 5 months later no tumour is observable anymore with the usual detection tools (X-ray, ProstaScint scan, MRI, transrectal ultrasonography, CT scan, etc.) and the levels of PSA came back to normal.

### Example 23

### Method for Treating Breast Cancer

[0433] A 48 year old woman diagnosed with a stage IIIa breast cancer is treated with neoadjuvant chemotherapy. To improve the effects of the treatment and to prevent metastasis she receives a transphenoidal injection of an NGF peptide TM fusion protein of the invention (eg. SEQ ID 11, 19). Within 8 weeks a significant shrinkage of the tumour is observed without appearance of metastasis elsewhere, in correlation with a significant decrease in IGF-1 blood level. A radical mastectomy is then realized with reconstruction. The injection of the fusion protein is repeated 3 months later when the IGF-1 blood level starts to rise again and 8 months later no tumour is observable anymore with the usual detection tools (MRI, ultrasound, breast-specific positron emission tomography, mammography, etc).

### Example 24

### Method for Treating Small Cell Lung Cancer

[0434] A 58 year old man diagnosed with a limited stage Small Cell Lung Cancer cancer is treated with chemotherapy with radiation therapy. To improve the effects of the treatments and to prevent metastasis to appear elsewhere, he receives a transphenoidal injection of a CST or SST peptide TM fusion protein of the invention (eg. SEQ ID 16, 20, 25, 28, 39-41). Within 3 weeks a significant shrinkage of the tumour is observed without appearance of metastasis elsewhere, in correlation with a significant decrease in IGF-1 blood level. The treatment is repeated 3 months later when the IGF-1 blood level starts to rise again and 7 months later no tumour is observable anymore with the usual detection tools (X-rays, CT scan, MRI, PET scanning, Radionuclide imaging, bronchoscopy, etc.) or using the usual blood tests recommended for this cancer.

### Example 25

### Method for Treating Colorectal Cancer

[0435] A 75 year old man diagnosed with a stage II colorectal tumour receives a intravenous injection of a GHRH peptide TM fusion protein of the invention (e.g. SEQ ID 9, 23-24, 33-38, 57-87, 88-104). Within 2 weeks a significant shrinkage of the tumour is observed without appearance of metastasis elsewhere, in correlation with a significant decrease in IGF-1 blood level. The patient goes then through surgery to remove the tumour. The treatment is repeated 4 months later when the IGF-1 blood level starts to rise again and 8 months later no tumour is observable anymore with the usual detection tools (colonoscopy, CT scan, PET scan, etc.) and the level of carcinoembryonic antigen (CEA) stays normal.

### Example 26

### Method for Treating Prostate Cancer

[0436] A 66 year old man diagnosed with a stage II prostate cancer is treated with brachytherapy and external beam radiation combined. To improve the effects of the treatments and to prevent metastasis he receives a transphenoidal injection of an ErbB peptide TM fusion protein of the invention (eg. SEQ ID 10). Within 5 weeks a significant shrinkage of the tumour is observed without appearance of metastasis elsewhere, in correlation with a significant decrease in IGF-1 blood level. The treatment is repeated 3 months later when the IGF-1 blood level starts to rise again and 6 months later no tumour is observable anymore with the usual detection tools (X-ray, ProstaScint scan, MRI, transrectal ultrasonography, CT scan, etc.) and the levels of PSA came back to normal.

### Example 27

### Method for Treating Breast Cancer

[0437] A 51 year old woman diagnosed with a stage II breast cancer is treated with adjuvant therapies: hormone therapy, chemotherapy, and trastuzumab. To improve the effects of the treatment and to prevent metastasis she receives a transphenoidal injection of a VIP peptide TM fusion protein of the invention (eg. SEQ ID 13, 21). Within 2 weeks a significant shrinkage of the tumour is observed without appearance of metastasis elsewhere, in correlation with a significant decrease in IGF-1 blood level. The treatment is repeated 2 months later when the IGF-1 blood level starts to rise again and 6 months later no tumour is observable anymore with the usual detection tools (MRI, ultrasound, breast-specific positron emission tomography, mammography, etc).

### Example 28

### Method for Treating Small Cell Lung Cancer

[0438] A 56 year old man diagnosed with a Small Cell Lung Cancer at an extensive stage is treated with chemotherapy and radiation therapy. To improve the effects of the treatments and to prevent metastasis elsewhere he receives a transphenoidal injection of a ghrelin peptide TM fusion protein of the invention (eg. SEQ ID 8, 17, 22, 26-37). Within 3 weeks a significant shrinkage of the tumour and a diminution in size of the metastasis is observed without appearance of new metastasis elsewhere, in correlation with a significant decrease in IGF-1 blood level. The treatment is repeated twice after 2 months and 5 months, when the IGF-1 blood level starts to rise again. The patients died 11 months later, 6 months later than expected with this type of treatment and this stage of the disease.

### Example 29

### Binding, Secretion and In Vivo Assays

[0439] To determine the efficacy of the polypeptide fusions we have confirmed their ability to bind appropriate receptors, decrease GH secretion in vivo and in vitro, and to decrease tumour growth in vivo. The following assays are exemplified with GHRH fusion proteins

### A) Binding Assay:

[0440] Primary pituitary cells cultures are established from 6-8 week old male wistar rats. The neurointermediate lobes are dissected out and the remaining tissue is cut into small pieces and transferred to isolation buffer. Cells are then cultured in 24-well plates for 48 hours prior to preparation for the assay.

[0441] Using a rapid and sensitive radiometric Scintillation Proximity Assay (SPA) the binding affinity of the GHRH fusion protein is evaluated. In this regard, we incubate rat GHRH membrane fractions with SPA beads and ¹²⁵I-labelled GHRH in assay buffer. An 8-points IC₅₀ displacement assay is then realized using various concentrations from 10⁻¹² to 10⁻⁶M of the GHRH-fusion protein to be tested.

### B) Secretion Assay:

[0442] Using MtT/S cells known to express the GHRH receptor and to secrete Growth Hormone we demonstrate the potency of the GHRH constructs on GH secretion. After 48 h with 10⁻⁸M corticosterone to induce the differentiation of the MtT/S cells, the culture medium is replaced by a culture medium containing 10 nM of the GHRH-fusion-protein (LHnD and double-inactivated LHnD as a control). After 48 h, the MtT/S cells are submitted to a secretion assay using 10 μM forskolin, or 40 mM KCl or 10⁻⁸M GHRH. An example of this type of secretion assay is presented on FIG. 3 using various LHn to determine their efficiency to decrease Growth Hormone from MtT/S cells.

### C) In Vivo Assay:

[0443] The GHRH-fusion-proteins (FIGS. 4 and 5) are tested in a xenograft model of cancer using colorectal cell lines: Caco 2, HT 29, SW 837, or SW 480 transplanted in 4-6 weeks old athymic nude (Nu/Nu) mice. The mice are injected with 0.5×10⁷ cells. The tumour size is measured by digital calliper twice a week and tumour volumes are estimated according to the formula for an ellipse (short dimension)²×(long dimension)/2. When the xenografts reach ˜70, ˜150, or ˜150 mm3, the mice are then randomized to receive (PBS) or the GHRH-fusion-proteins (the active one or the double inactivated version) and the tumours are harvested 4 days after the beginning of the treatment. Mice are injected with BrdU 2 h prior to sacrifice. BrdU only incorporates in the DNA of dividing cells when they are in S-phase and is then a specific marker of cell proliferation. IGF-1 level is assessed by collecting the blood through cardiac puncture under isoflurane anaesthesia, allowed to clot for 1 h at room temperature and serum collected after centrifugation. IGF-1 is analyzed by ELISA according to the manufacturer's instructions. The final size of the tumours is measured and compared, per groups (treated with fusion-proteins: active or not, or untreated) and compared to the IGF-1 levels measured.

### Conclusion:

[0444] These data confirm that targeting the GH/IGF-1 axis is a valid approach to treating cancer. By decreasing the level of GH/IGF-1 it is possible to decrease the proliferation of the IGF-1 dependent tumours, and thus we can slow down the progression of these deadly cancers.

### Example 30

### Method for Treating Non-Small Cell Lung Cancer

[0445] A 52 year old male non-smoker diagnosed with a stage II adenocarcinoma, non-small cell lung cancer and undergoing radiotherapy following surgical removal of the tumour is given a transphenoidal injection of a GHRH peptide TM fusion protein of the invention (e.g. SEQ ID 9, 23-24, 33-38, 57-87, 88-104). Within 4 weeks a significant decrease in the size of the tumour is observed without appearance of metastasis elsewhere, in correlation with a significant decrease in IGF-1 blood level. Radiation therapy is discontinued at this point and tumour size does not increase and there are no metastasis observed. Treatment with the fusion protein is repeated 3 months later when the IGF-1 blood level starts to rise again and tumour size remains stable with no metastasis over the next 3 months without any additional intervention being required.

### Example 31

### Method for Treating Non-Small Cell Lung Cancer

[0446] A 60 year old female smoker diagnosed with a stage IV undifferentiated large cell carcinoma, with metastases in the liver and bone undergoing chemotherapy and radiotherapy is given a transphenoidal injection of an IGF-1 peptide TM fusion protein of the invention (eg. SEQ ID 15, 18). Within 4 weeks blood tests for alkaline phosphatase and alanine aminotransferase indicate reduced tissue damage within the bone and liver indicating reduction in the metastatic cancer. Bone scans also reveal a reduction in the bone metastase. Disease progression is slowed and at 4 months survival the patient is given a further treatment of the fusion protein.

### Example 32

### Method for Treating Non-Small Cell Lung Cancer

[0447] A 54 year old male smoker diagnosed with a stage I squamous cell carcinoma in the bronchi of the central chest area is given a transphenoidal injection of a GHRH peptide TM fusion protein of the invention (e.g. SEQ ID 9, 23-24, 33-38, 57-87, 88-104). Within 5 weeks a significant shrinkage of the tumour is observed without appearance of metastasis elsewhere, in correlation with a significant decrease in IGF-1 blood level. The treatment is repeated 5 months later when the IGF-1 blood level starts to rise again and 4 months later no tumour is observable with the usual detection tools (X-rays, CT scan, MRI, PET scanning, Radionuclide imaging, bronchoscopy, etc.) or using the usual blood tests recommended for this cancer.

### Example 33

### Method for Treating Breast Cancer

[0448] A 50 year old woman diagnosed with a stage IIIa breast cancer is treated with neoadjuvant chemotherapy. To improve the effects of the treatment and to prevent metastasis she receives a corticotropin-releasing factor receptor 1 binding peptide TM fusion of the invention (eg. SEQ ID 56). Within 8 weeks a significant shrinkage of the tumour is observed without appearance of metastasis elsewhere, in correlation with a significant decrease in IGF-1 blood level. A radical mastectomy is then realized with reconstruction. The injection of the fusion protein is repeated 3 months later when the IGF-1 blood level starts to rise again and 8 months later no tumour is observable anymore with the usual detection tools (MRI, ultrasound, breast-specific positron emission tomography, mammography, etc).

### Example 34

### Method for Treating Small Cell Lung Cancer

[0449] A 60 year old man diagnosed with a limited stage Small Cell Lung Cancer cancer is treated with chemotherapy with radiation therapy. To improve the effects of the treatments and to prevent metastasis to appear elsewhere, he receives a transphenoidal injection of a KiSS-10 or KiSS-54 peptide TM fusion of the invention (eg. SEQ ID 54). Within 3 weeks a significant shrinkage of the tumour is observed without appearance of metastasis elsewhere, in correlation with a significant decrease in IGF-1 blood level. The treatment is repeated 3 months later when the IGF-1 blood level starts to rise again and 7 months later no tumour is observable anymore with the usual detection tools (X-rays, CT scan, MRI, PET scanning, Radionuclide imaging, bronchoscopy, etc.) or using the usual blood tests recommended for this cancer.

### Example 35

### Method for Treating Colorectal Cancer

[0450] A 70 year old man diagnosed with a stage II colorectal tumour receives a intravenous injection of a melanin-concentrating hormone peptide TM fusion of the invention (eg. SEQ ID 53). Within 2 weeks a significant shrinkage of the tumour is observed without appearance of metastasis elsewhere, in correlation with a significant decrease in IGF-1 blood level. The patient goes then through surgery to remove the tumour. The treatment is repeated 4 months later when the IGF-1 blood level starts to rise again and 8 months later no tumour is observable anymore with the usual detection tools (colonoscopy, CT scan, PET scan, etc.) and the level of carcinoembryonic antigen (CEA) stays normal.

### Example 36

### Method for Treating Prostate Cancer

[0451] A 40 year old man diagnosed with a stage II prostate cancer is treated with brachytherapy and external beam radiation combined. To improve the effects of the treatments and to prevent metastasis he receives a transphenoidal injection of a prolactin-releasing peptide TM fusion of the invention (eg. SEQ ID 55). Within 5 weeks a significant shrinkage of the tumour is observed without appearance of metastasis elsewhere, in correlation with a significant decrease in IGF-1 blood level. The treatment is repeated 3 months later when the IGF-1 blood level starts to rise again and 6 months later no tumour is observable anymore with the usual detection tools (X-ray, ProstaScint scan, MRI, transrectal ultrasonography, CT scan, etc.) and the levels of PSA came back to normal.

### Example 37

### Activity of CP-GHRH-LHD on Rat IGF-1 Levels In Vivo

[0452] Aims—to assess the impact of i.v. adminisation of CP-GHRH-LHD fusion on IGF-1 levels in rats five days after treatment compared with vehicle only treated control.

### Materials and Methods

[0453] Animals: Adult male Sprague-Dawley rats maintained under standard housing conditions with lights on at 05.00 h (14 L:10 D), food and water available ad libitum and habituated to housing conditions for at least 1 week prior to surgery.

[0454] Surgery: On day 1 of the study rats (200-250 g) will be anaesthetised with a combination of Hypnorm (0.32 mg/kg fentanyl citrate and 10 mg/kg fluanisone, i.m.) and diazepam (2.6 mg/kg i.p.). The right jugular vein is exposed and a silastic tipped (i.d. 0.50 mm, o.d. 0.93 mm) polythene cannula (Portex, UK) inserted into the vessel until it lies close to the entrance of the right atrium. Cannulae will be prefilled with heparinised (10 IU/ml) isotonic saline. The free end of the cannulae will be exteriorised through a scalp incision and then tunnelled through a protective spring anchored to the skull using two stainless steel screws and self-curing dental acrylic. Following recovery animals are housed in individual cages in the automated blood sampling room. The end of the protective spring is attached to a mechanical swivel that allows the animal maximum freedom of movement. Cannulae are flushed daily with heparinised saline to maintain patency.

[0455] Treatment: At 09:00 on day 2 of the study rats will receive in i.v. injection of CP-GHRH-LHD or vehicle only control.

[0456] Sampling: The automated blood-sampling system (ABS) has been previously described (Clark et al., 1986; Windle et al., 1997). Three to four days after surgery the jugular vein cannula of each animal will be connected to the automated blood-sampling system. At 07:00 on day 6 sampling will begin. Blood samples will be collected at 10 minute intervals using the automated system for a 24 hour period. A total of 144 blood samples will be collected for each will contain no more than 38 μl of whole blood.

### Results

[0457] The IGF-1 levels were measure using an IGF-1 ELISA kit. FIG. 7 illustrates a statistically significant reduction in the IGF-1 levels in the fusion treated rats compared to the vehicle only control with a t-test P value=0.0416 after only five days.

### Example 38

### Activity of CP-GHRH-LHD on Rat IGF-1 Levels In Vivo

[0458] Aims—to investigate the activity time course for CP-GHRH-LHD fusion identifying the time delay between administration and initial effect of the compound in IGF-1 levels.

### Materials and Methods:

[0459] Animals: Adult male Sprague-Dawley rats maintained under standard housing conditions with lights on at 05.00 h (14 L:10 D), food and water available ad libitum and habituated to housing conditions for at least 1 week prior to surgery.

[0460] Surgery: On day 1 of the study rats (260-280 g) will be anaesthetised with a combination of Hypnorm and diazepam. The right jugular vein is then exposed and a silastic tipped (i.d. 0.50 mm, o.d. 0.93 mm) polythene cannula (Portex, UK) inserted into the vessel until it lies close to the entrance of the right. Cannulae will be prefilled with heparinised (10 IU/ml) isotonic saline. The free end of the cannulae will be exteriorised through a scalp incision and passed through a spring anchored to the skull using stainless steel screws and dental cement. Following recovery animals will be housed in individual cages in the ABS room. The spring will be attached to a swivel that allows the animal maximum freedom of movement. Cannulae will be flushed daily with heparinised saline to maintain patency.

[0461] Treatment: At 10:00 h on day 5 of the study rats will receive in i.v. injection of the CP-GHRH-LHD or vehicle (sterile saline).

[0462] Blood sampling: After flushing the cannulae a single manual blood sample (100 μl) will be taken from each rat at 09.30 h. Samples will be taken from day 5 to day 18 of the experiment (or until the cannulae block). Plasma from blood samples will be stored at −20 C for later analysis of IGF-1 content by ELISA kit.

### Results

[0463] FIG. 8 illustrates a statistically significant reduction in the IGF-1 levels in the fusion treated rats compared to the vehicle only control from day four after treatment.

### Example 39

### Activity of CP-GHRH-LHD on Rat GH Levels In Vivo

[0464] Aims—to assess the impact of i.v. adminisation of CP-GHRH-LHD fusion on growth hormone levels in rats five days after treatment compared with vehicle only treated and Octreotide infusion controls.

### Materials and Methods

[0465] Animals: Adult male Sprague-Dawley rats maintained under standard housing conditions with lights on at 05.00 h (14 L:10 D), food and water available ad libitum and habituated to housing conditions for at least 1 week prior to surgery.

[0466] Surgery: On day 1 of the study rats (200-250 g) will be anaesthetised with a combination of Hypnorm (0.32 mg/kg fentanyl citrate and 10 mg/kg fluanisone, i.m.) and diazepam (2.6 mg/kg i.p.). The right jugular vein is exposed and a silastic tipped (i.d. 0.50 mm, o.d. 0.93 mm) polythene cannula (Portex, UK) inserted into the vessel until it lies close to the entrance of the right atrium. Cannulae will be prefilled with heparinised (10 IU/ml) isotonic saline. The free end of the cannulae will be exteriorised through a scalp incision and then tunnelled through a protective spring anchored to the skull using two stainless steel screws and self-curing dental acrylic. Following recovery animals are housed in individual cages in the automated blood sampling room. The end of the protective spring is attached to a mechanical swivel that allows the animal maximum freedom of movement. Cannulae are flushed daily with heparinised saline to maintain patency.

[0467] Treatment: At 09:00 on day 2 of the study rats will receive in i.v. injection of the Syntaxin active compound or vehicle. A 12 hour infusion of somatostatin (or an analogue) will begin 6 hours after the start of sampling (administered via one of the dual cannulae lines) and will continue for 12 hours only. [This infusion timing should be an excellent GH assay control as we should see baseline secretion then complete inhibition and then rapid recovery/rebound]

[0468] Sampling: The automated blood-sampling system (ABS) has been previously described (Clark et al., 1986; Windle et al., 1997). Three to four days after surgery the jugular vein cannula of each animal will be connected to the automated blood-sampling system. At 07:00 on day 6 sampling will begin. Blood samples will be collected at 10 minute intervals using the automated system for a 24 hour period. A total of 144 blood samples will be collected for each will contain no more than 38 μl of whole blood.

### Results

[0469] The growth hormone levels were measure using an RIA assay. FIG. 9a illustrates the vehical treated animals which show typical pulsatile release of growth hormone, FIG. 9b illustrates the complete ablation of the pulsatile growth hormone release after treatment with GHRH-LHD chimera and FIG. 9c shows the blocking of the pulsatile growth hormone release and subsequent recovery when the Octreotide infusion is stopped.

SEQUENCE LISTING

SEQ ID1 LH_{N}A
ggatccatggagttcgttaacaaacagttcaactataaagacccagttaacggtgttgacattgcttacatcaaaatcccgaacgctggc
cagatgcagccggtaaaggcattcaaaatccacaacaaaatctgggttatcccggaacgtgatacctttactaacccggaagaaggtg
acctgaacccgccaccggaagcgaaacaggtgccggtatcttactatgactccacctacctgtctaccgataacgaaaaggacaacta
cctgaaaggtgttactaaactgttcgagcgtatttactccaccgacctgggccgtatgctgctgactagcatcgttcgcggtatcccgttctg
gggcggttctaccatcgataccgaactgaaagtaatcgacactaactgcatcaacgttattcagccggacggttcctatcgttccgaaga
actgaacctggtgatcatcggcccgtctgctgatatcatccagttcgagtgtaagagctttggtcacgaagttctgaacctcacccgtaacg
gctacggttccactcagtacatccgtttctctccggacttcaccttcggttttgaagaatccctggaagtagacacgaacccactgctgggc
gctggtaaattcgcaactgatcctgcggttaccctggctcacgaactgattcatgcaggccaccgcctgtacggtatcgccatcaatccga
accgtgtcttcaaagttaacaccaacgcgtattacgagatgtccggtctggaagttagcttcgaagaactgcgtacttttggcggtcacga
cgctaaattcatcgactctctgcaagaaaacgagttccgtctgtactactataacaagttcaaagatatcgcatccaccctgaacaaagc
gaaatccatcgtgggtaccactgcttctctccagtacatgaagaacgtttttaaagaaaaatacctgctcagcgaagacacctccggcaa
attctctgtagacaagttgaaattcgataaactttacaaaatgctgactgaaatttacaccgaagacaacttcgttaagttctttaaagttctg
aaccgcaaaacctatctgaacttcgacaaggcagtattcaaaatcaacatcgtgccgaaagttaactacactatctacgatggtttcaac
ctgcgtaacaccaacctggctgctaattttaacggccagaacacggaaatcaacaacatgaacttcacaaaactgaaaaacttcactg
gtctgttcgagttttacaagctgctgtgcGTCGACGGCATCATTACCTCCAAAACTAAATCTGACGATGACGA
TAAAAACAAAGCGCTGAACCTGCAGtgtatcaaggttaacaactgggatttattcttcagcccgagtgaagacaacttca
ccaacgacctgaacaaaggtgaagaaatcacctcagatactaacatcgaagcagccgaagaaaacatctcgctggacctgatccag
cagtactacctgacctttaatttcgacaacgagccggaaaacatttctatcgaaaacctgagctctgatatcatcggccagctggaactga
tgccgaacatcgaacgtttcccaaacggtaaaaagtacgagctggacaaatataccatgttccactacctgcgcgcgcaggaatttgaa
cacggcaaatcccgtatcgcactgactaactccgttaacgaagctctgctcaacccgtcccgtgtatacaccttcttctctagcgactacgt
gaaaaaggtcaacaaagcgactgaagctgcaatgttcttgggttgggttgaacagcttgtttatgattttaccgacgagacgtccgaagta
tctactaccgacaaaattgcggatatcactatcatcatcccgtacatcggtccggctctgaacattggcaacatgctgtacaaagacgact
tcgttggcgcactgatcttctccggtgcggtgatcctgctggagttcatcccggaaatcgccatcccggtactgggcacctttgctctggtttct
tacattgcaaacaaggttctgactgtacaaaccatcgacaacgcgctgagcaaacgtaacgaaaaatgggatgaagtttacaaatata
tcgtgaccaactggctggctaaggttaatactcagatcgacctcatccgcaaaaaaatgaaagaagcactggaaaaccaggcggaa
gctaccaaggcaatcattaactaccagtacaaccagtacaccgaggaagaaaaaaacaacatcaacttcaacatcgacgatctgtcc
tctaaactgaacgaatccatcaacaaagctatgatcaacatcaacaagttcctgaaccagtgctctgtaagctatctgatgaactccatga
tcccgtacggtgttaaacgtctggaggacttcgatgcgtctctgaaagacgccctgctgaaatacatttacgacaaccgtggcactctgat
cggtcaggttgatcgtctgaaggacaaagtgaacaataccttatcgaccgacatcccttttcagctcagtaaatatgtcgataaccaacgc
cttttgtccactctagaataatgaaagctt
SEQ ID2 LH_{N}B
ggatccatgccggttaccatcaacaacttcaactacaacgacccgatcgacaacaacaacatcattatgatggaaccgccgttcgcac
gtggtaccggacgttactacaaggcttttaagatcaccgaccgtatctggatcatcccggaacgttacaccttcggttacaaacctgagga
cttcaacaagagtagcgggattttcaatcgtgacgtctgcgagtactatgatccagattatctgaataccaacgataagaagaacatattc
cttcagactatgattaaactcttcaaccgtatcaaaagcaaaccgctcggtgaaaaactcctcgaaatgattatcaacggtatcccgtacc
tcggtgaccgtcgtgtcccgcttgaagagttcaacaccaacatcgcaagcgtcaccgtcaacaaactcatcagcaacccaggtgaagt
cgaacgtaaaaaaggtatcttcgcaaacctcatcatcttcggtccgggtccggtcctcaacgaaaacgaaaccatcgacatcggtatcc
agaaccacttcgcaagccgtgaaggtttcggtggtatcatgcagatgaaattctgcccggaatacgtcagtgtcttcaacaacgtccagg
aaaacaaaggtgcaagcatcttcaaccgtcgtggttacttcagcgacccggcactcatcctcatgcatgaactcatccacgtcctccacg
gtctctacggtatcaaagttgacgacctcccgatcgtcccgaacgagaagaaattcttcatgcagagcaccgacgcaatccaggctga
ggaactctacaccttcggtggccaagacccaagtatcataaccccgtccaccgacaaaagcatctacgacaaagtcctccagaacttc
aggggtatcgtggacagactcaacaaagtcctcgtctgcatcagcgacccgaacatcaatatcaacatatacaagaacaagttcaaa
gacaagtacaaattcgtcgaggacagcgaaggcaaatacagcatcgacgtagaaagtttcgacaagctctacaaaagcctcatgttc
ggtttcaccgaaaccaacatcgccgagaactacaagatcaagacaagggcaagttacttcagcgacagcctcccgcctgtcaaaatc
aagaacctcttagacaacgagatttacacaattgaagagggcttcaacatcagtgacaaagacatggagaaggaatacagaggtca
gaacaaggctatcaacaaacaggcatacgaggagatcagcaaagaacacctcgcagtctacaagatccagatgtgcgtcgacgaa
gaaaagctgtacgacgacgacgacaaagaccgttggggttcttcgctgcagtgcatcgacgttgacaacgaagacctgttcttcatcgct
gacaaaaacagcttcagtgacgacctgagcaaaaacgaacgtatcgaatacaacacccagagcaactacatcgaaaacgacttcc
cgatcaacgaactgatcctggacaccgacctgataagtaaaatcgaactgccgagcgaaaacaccgaaagtctgaccgacttcaac
gttgacgttccggtttacgaaaaacagccggctatcaagaaaatcttcaccgacgaaaacaccatcttccagtacctgtacagccagac
cttcccgctggacatccgtgacatcagtctgaccagcagtttcgacgacgctctgctgttcagcaacaaagtttacagtttcttcagcatgg
actacatcaaaaccgctaacaaagttgttgaagcagggctgttcgctggttgggttaaacagatcgttaacgacttcgttatcgaagctaa
caaaagcaacactatggacgcaatcgctgacatcagtctgatcgttccgtacatcggtctggctctgaacgttggtaacgaaaccgctaa
aggtaactttgaaaacgctttcgagatcgctggtgcaagcatcctgctggagttcatcccggaactgctgatcccggttgttggtgctttcctg
ctggaaagttacatcgacaacaaaaacaagatcatcaaaaccatcgacaacgctctgaccaaacgtaacgaaaaatggagtgatat
gtacggtctgatcgttgctcagtggctgagcaccgtcaacacccagttctacaccatcaaagaaggtatgtacaaagctctgaactacca
ggctcaggctctggaagagatcatcaaataccgttacaacatctacagtgagaaggaaaagagtaacatcaacatcgacttcaacga
catcaacagcaaactgaacgaaggtatcaaccaggctatcgacaacatcaacaacttcatcaacggttgcagtgttagctacctgatga
agaagatgatcccgctggctgttgaaaaactgctggacttcgacaacaccctgaaaaagaacctgctgaactacatcgacgaaaaca
agctgtacctgatcggtagtgctgaatacgaaaaaagtaaagtgaacaaatacctgaagaccatcatgccgttcgacctgagtatctac
accaacgacaccatcctgatcgaaatgttcaacaaatacaactctctagaataatgaaagctt
SEQ ID3 LH_{N}C
ggatccatgccgatcaccatcaacaacttcaactacagcgatccggtggataacaaaaacatcctgtacctggatacccatctgaatac
cctggcgaacgaaccggaaaaagcgtttcgtatcaccggcaacatttgggttattccggatcgttttagccgtaacagcaacccgaatct
gaataaaccgccgcgtgttaccagcccgaaaagcggttattacgatccgaactatctgagcaccgatagcgataaagataccttcctga
aagaaatcatcaaactgttcaaacgcatcaacagccgtgaaattggcgaagaactgatctatcgcctgagcaccgatattccgtttccgg
gcaacaacaacaccccgatcaacacctttgatttcgatgtggatttcaacagcgttgatgttaaaacccgccagggtaacaattgggtga
aaaccggcagcattaacccaagcgtgattattaccggtccgcgcgaaaacattattgatccggaaaccagcacctttaaactgaccaa
caacacctttgcggcgcaggaaggttttggcgcgctgagcattattagcattagcccgcgctttatgctgacctatagcaacgcgaccaa
cgatgttggtgaaggccgtttcagcaaaagcgaattttgcatggacccgatcctgatcctgatgcatgaactgaaccatgcgatgcataa
cctgtatggcatcgcgattccgaacgatcagaccattagcagcgtgaccagcaacatcttttacagccagtacaacgtgaaactggaat
atgcggaaatctatgcgtttggcggtccgaccattgatctgattccgaaaagcgcgcgcaaatacttcgaagaaaaagcgctggattact
atcgcagcattgcgaaacgtctgaacagcattaccaccgcgaatccgagcagcttcaacaaatatatcggcgaatataaacagaaact
gatccgcaaatatcgctttgtggtggaaagcagcggcgaagttaccgttaaccgcaataaattcgtggaactgtacaacgaactgaccc
agatcttcaccgaatttaactatgcgaaaatctataacgtgcagaaccgtaaaatctacctgagcaacgtgtataccccggtgaccgcga
atattctggatgataacgtgtacgatatccagaacggctttaacatcccgaaaagcaacctgaacgttctgtttatgggccagaacctgag
ccgtaatccggcgctgcgtaaagtgaacccggaaaacatgctgtacctgttcaccaaattttgcgtcgacgcgattgatggtcgtagcctg
tacaacaaaaccctgcagtgtcgtgaactgctggtgaaaaacaccgatctgccgtttattggcgatatcagcgatgtgaaaaccgatatc
ttcctgcgcaaagatatcaacgaagaaaccgaagtgatctactacccggataacgtgagcgttgatcaggtgatcctgagcaaaaaca
ccagcgaacatggtcagctggatctgctgtatccgagcattgatagcgaaagcgaaattctgccgggcgaaaaccaggtgttttacgat
aaccgtacccagaacgtggattacctgaacagctattactacctggaaagccagaaactgagcgataacgtggaagattttacctttac
ccgcagcattgaagaagcgctggataacagcgcgaaagtttacacctattttccgaccctggcgaacaaagttaatgcgggtgttcagg
gcggtctgtttctgatgtgggcgaacgatgtggtggaagatttcaccaccaacatcctgcgtaaagataccctggataaaatcagcgatgt
tagcgcgattattccgtatattggtccggcgctgaacattagcaatagcgtgcgtcgtggcaattttaccgaagcgtttgcggttaccggtgt
gaccattctgctggaagcgtttccggaatttaccattccggcgctgggtgcgtttgtgatctatagcaaagtgcaggaacgcaacgaaatc
atcaaaaccatcgataactgcctggaacagcgtattaaacgctggaaagatagctatgaatggatgatgggcacctggctgagccgtat
tatcacccagttcaacaacatcagctaccagatgtacgatagcctgaactatcaggcgggtgcgattaaagcgaaaatcgatctggaat
acaaaaaatacagcggcagcgataaagaaaacatcaaaagccaggttgaaaacctgaaaaacagcctggatgtgaaaattagcg
aagcgatgaataacatcaacaaattcatccgcgaatgcagcgtgacctacctgttcaaaaacatgctgccgaaagtgatcgatgaact
gaacgaatttgatcgcaacaccaaagcgaaactgatcaacctgatcgatagccacaacattattctggtgggcgaagtggataaactg
aaagcgaaagttaacaacagcttccagaacaccatcccgtttaacatcttcagctataccaacaacagcctgctgaaagatatcatcaa
cgaatacttcaatctagactaataagctt
SEQ ID4 LH_{N}D
ggatccatgacgtggccagttaaggatttcaactactcagatcctgtaaatgacaacgatattctgtaccttcgcattccacaaaataaact
gatcaccacaccagtcaaagcattcatgattactcaaaacatttgggtcattccagaacgcttttctagtgacacaaatccgagtttatctaa
acctccgcgtccgacgtccaaatatcagagctattacgatccctcatatctcagtacggacgaacaaaaagatactttccttaaaggtatc
attaaactgtttaagcgtattaatgagcgcgatatcgggaaaaagttgattaattatcttgttgtgggttccccgttcatgggcgatagctctac
ccccgaagacacttttgattttacccgtcatacgacaaacatcgcggtagagaagtttgagaacggatcgtggaaagtcacaaacatca
ttacacctagcgtcttaatttttggtccgctgccaaacatcttagattatacagccagcctgactttgcaggggcaacagtcgaatccgagttt
cgaaggttttggtaccctgagcattctgaaagttgccccggaatttctgctcactttttcagatgtcaccagcaaccagagctcagcagtatt
aggaaagtcaattttttgcatggacccggttattgcactgatgcacgaactgacgcactctctgcatcaactgtatgggatcaacatcccca
gtgacaaacgtattcgtccccaggtgtctgaaggatttttctcacaggatgggccgaacgtccagttcgaagagttgtatactttcggaggc
ctggacgtagagatcattccccagattgagcgcagtcagctgcgtgagaaggcattgggccattataaggatattgcaaaacgcctgaa
taacattaacaaaacgattccatcttcgtggatctcgaatattgataaatataagaaaatttttagcgagaaatataattttgataaagataat
acaggtaactttgtggttaacattgacaaattcaactccctttacagtgatttgacgaatgtaatgagcgaagttgtgtatagttcccaataca
acgttaagaatcgtacccattacttctctcgtcactacctgccggttttcgcgaacatccttgacgataatatttacactattcgtgacggct
ttaacttgaccaacaagggcttcaatattgaaaattcaggccagaacattgaacgcaacccggccttgcagaaactgtcgagtgaatccgt
ggttgacctgtttaccaaagtctgcgtcgacaaaagcgaagagaagctgtacgatgacgatgacaaagatcgttggggatcgtccctgc
agtgtattaaagtgaaaaacaatcggctgccttatgtagcagataaagatagcattagtcaggagattttcgaaaataaaattatcactga
cgaaaccaatgttcagaattattcagataaattttcactggacgaaagcatcttagatggccaagttccgattaacccggaaattgttgatc
cgttactgccgaacgtgaatatggaaccgttaaacctccctggcgaagagatcgtattttatgatgacattacgaaatatgtggactacctt
aattcttattactatttggaaagccagaaactgtccaataacgtggaaaacattactctgaccacaagcgtggaagaggctttaggctact
caaataagatttataccttcctcccgtcgctggcggaaaaagtaaataaaggtgtgcaggctggtctgttcctcaactgggcgaatgaagt
tgtcgaagactttaccacgaatattatgaaaaaggataccctggataaaatctccgacgtctcggttattatcccatatattggccctgcgtt
aaatatcggtaatagtgcgctgcgggggaattttaaccaggcctttgctaccgcgggcgtcgcgttcctcctggagggctttcctgaatttac
tatcccggcgctcggtgtttttacattttactcttccatccaggagcgtgagaaaattatcaaaaccatcgaaaactgcctggagcagcggg
tgaaacgctggaaagattcttatcaatggatggtgtcaaactggttatctcgcatcacgacccaattcaaccatattaattaccagatgtatg
atagtctgtcgtaccaagctgacgccattaaagccaaaattgatctggaatataaaaagtactctggtagcgataaggagaacatcaaa
agccaggtggagaaccttaagaatagtctggatgtgaaaatctctgaagctatgaataacattaacaaattcattcgtgaatgttcggtga
cgtacctgttcaagaatatgctgccaaaagttattgatgaactgaataaatttgatctgcgtaccaaaaccgaacttatcaacctcatcgac
tcccacaacattatccttgtgggcgaagtggatcgtctgaaggccaaagtaaacgagagctttgaaaatacgatgccgtttaatattttttca
tataccaataactccttgctgaaagatatcatcaatgaatatttcaatctagaataataagctt
SEQ ID5 IgA-H_{N}tet
ggatccATGGAGTCCAATCAGCCGGAAAAAAATGGAACCGCGACTAAACCCGAGAATTCGGGG
AACACTACGTCGGAAAACGGCCAGACGGAACCTGAGAAGAAACTGGAACTACGAAATGTGT
CCGATATCGAGCTATACTCTCAAACCAATGGAACCTATAGGCAGCATGTTTCATTGGACGGA
ATCCCAGAAAATACGGATACATATTTCGTCAAAGTGAAGTCTAGCGCATTCAAGGATGTATAT
ATCCCCGTTGCGAGTATTACAGAAGAGAAGCGGAACGGTCAAAGCGTTTATAAGATTACAGC
AAAGGCCGAAAAGTTACAACAGGAGTTAGAAAACAAATACGTTGACAATTTCACTTTTTATCT
CGATAAAAAGGCTAAAGAGGAAAACACGAACTTCACGTCATTTAGTAATCTGGTCAAAGCCA
TAAATCAAAATCCATCTGGTACATACCATCTCGCGGCAAGTCTAAACGCGAATGAAGTAGAA
CTTGGCCCGGACGAGCGTTCATACATTAAGGATACCTTTACTGGCAGACTCATAGGGGAAAA
AGACGGTAAGAACTATGCTATATACAATTTGAAAAAGCCTTTATTTGAGAACCTGTCGGGCG
CCACCGTCGAGAAATTGTCCCTTAAAAACGTAGCTATAAGCGGAAAGAATGACATCGGTAGT
CTTGCAAACGAGGCTACTAACGGGACAAAGATTAAACAAGTGCACGTAGATGGGtgtgtcgacgg
catcattacctccaaaactaaatctgacgatgacgataaaaacaaagcgctgaacctgcagtgcattaaaataaagaatgaggatttg
acattcatcgcagaaaaaaatagcttcagcgaagagccgttccaagatgagatagtaagctacaacaccaagaacaagccgcttaat
tttaattactcgttagataaaatcatagttgactacaaccttcaatcgaagatcacgttaccgaatgacagaacaactcctgtcacaaaag
gaattccctatgcacctgagtataagtcaaatgccgcgtcaacaatagagattcataatatagatgacaacaccatctatcaatatctgta
cgctcagaaaagtccaacaactcttcagcgtataacaatgaccaatagtgtcgatgacgcattgataaattctaccaagatatactcttatt
tcccgagcgtcatctccaaagttaatcaaggtgctcaaggcattctatttttgcaatgggtccgagacatcatagatgacttcactaatgagt
cgtctcagaaaaccacgattgataaaatatcagatgtttccaccatcgtcccctacatcggacctgcgcttaacattgtgaagcaggggta
tgaggggaattttatcggagcgttagaaactacgggggttgtgctattacttgaatacataccagagataacattgcccgttatagcggcc
ctcagtatcgcagaatcaagtacacaaaaagaaaagataatcaaaacaatcgacaacttcctagaaaagaggtacgaaaaatggat
agaggtttataaactcgtgaaagcgaaatggttaggcactgttaatacgcagttccaaaagagatcctatcaaatgtatagatcactgga
gtaccaggtggatgccataaagaaaattatcgactatgaatataaaatatattcaggtccagataaggagcagatagctgatgaaataa
acaatttaaaaaacaaacttgaagagaaggcgaataaggccatgatcaatatcaatatttttatgcgagaatcttcacgatcttttttggtaa
atcagatgattaacgaagccaaaaagcagctgcttgagttcgacacacagtccaaaaacatactaatgcaatatatcaaagcaaactc
aaaattcattggaattactgagctgaagaaactggaatccaaaataaataaagtattctctaccccgatcccgttctcttactctaaaaacc
ttgactgctgggtagataacgaagaagatattgacgttctagagtaataagctt
SEQ ID6 GHRP linker
Catatgccggttggatccatccaggtcgactttaaactgcagggtgttactctagagggcggtggcggtagcggtggcggtggcagcgg
cggtggcggtagcgcactagtgggcagctcatttctgtctccggaacatcaacgggtgcagcagcgtaaagagagtaaaaagccgcc
agcgaaattacagcctcgctaatagaagcttaagggcgaattc
SEQ ID7 GHRP-C fusion
catatgccggttggatccatgccgatcaccatcaacaacttcaactacagcgatccggtggataacaaaaacatcctgtacctggatac
ccatctgaataccctggcgaacgaaccggaaaaagcgtttcgtatcaccggcaacatttgggttattccggatcgttttagccgtaacagc
aacccgaatctgaataaaccgccgcgtgttaccagcccgaaaagcggttattacgatccgaactatctgagcaccgatagcgataaag
ataccttcctgaaagaaatcatcaaactgttcaaacgcatcaacagccgtgaaattggcgaagaactgatctatcgcctgagcaccgat
attccgtttccgggcaacaacaacaccccgatcaacacctttgatttcgatgtggatttcaacagcgttgatgttaaaacccgccagggta
acaattgggtgaaaaccggcagcattaacccgagcgtgattattaccggtccgcgcgaaaacattattgatccggaaaccagcaccttt
aaactgaccaacaacacctttgcggcgcaggaaggttttggcgcgctgagcattattagcattagcccgcgctttatgctgacctatagca
acgcgaccaacgatgttggtgaaggccgtttcagcaaaagcgaattttgcatggacccgatcctgatcctgatgcatgaactgaaccat
gcgatgcataacctgtatggcatcgcgattccgaacgatcagaccattagcagcgtgaccagcaacatcttttacagccagtacaacgt
gaaactggaatatgcggaaatctatgcgtttggcggtccgaccattgatctgattccgaaaagcgcgcgcaaatacttcgaagaaaaag
cgctggattactatcgcagcattgcgaaacgtctgaacagcattaccaccgcgaatccgagcagcttcaacaaatatatcggcgaatat
aaacagaaactgatccgcaaatatcgctttgtggtggaaagcagcggcgaagttaccgttaaccgcaataaattcgtggaactgtacaa
cgaactgacccagatcttcaccgaatttaactatgcgaaaatctataacgtgcagaaccgtaaaatctacctgagcaacgtgtatacccc
ggtgaccgcgaatattctggatgataacgtgtacgatatccagaacggctttaacatcccgaaaagcaacctgaacgttctgtttatgggc
cagaacctgagccgtaatccggcgctgcgtaaagtgaacccggaaaacatgctgtacctgttcaccaaattttgcgtcgacgcgattgat
ggtcgtagcctgtacaacaaaaccctgcagtgtcgtgaactgctggtgaaaaacaccgatctgccgtttattggcgatatcagcgatgtg
aaaaccgatatcttcctgcgcaaagatatcaacgaagaaaccgaagtgatctactacccggataacgtgagcgttgatcaggtgatcct
gagcaaaaacaccagcgaacatggtcagctggatctgctgtatccgagcattgatagcgaaagcgaaattctgccgggcgaaaacc
aggtgttttacgataaccgtacccagaacgtggattacctgaacagctattactacctggaaagccagaaactgagcgataacgtggaa
gattttacctttacccgcagcattgaagaagcgctggataacagcgcgaaagtttacacctattttccgaccctggcgaacaaagttaatg
cgggtgttcagggcggtctgtttctgatgtgggcgaacgatgtggtggaagatttcaccaccaacatcctgcgtaaagataccctggataa
aatcagcgatgttagcgcgattattccgtatattggtccggcgctgaacattagcaatagcgtgcgtcgtggcaattttaccgaagcgtttgc
ggttaccggtgtgaccattctgctggaagcgtttccggaatttaccattccggcgctgggtgcgtttgtgatctatagcaaagtgcaggaac
gcaacgaaatcatcaaaaccatcgataactgcctggaacagcgtattaaacgctggaaagatagctatgaatggatgatgggcacctg
gctgagccgtattatcacccagttcaacaacatcagctaccagatgtacgatagcctgaactatcaggcgggtgcgattaaagcgaaa
atcgatctggaatacaaaaaatacagcggcagcgataaagaaaacatcaaaagccaggttgaaaacctgaaaaacagcctggatg
tgaaaattagcgaagcgatgaataacatcaacaaattcatccgcgaatgcagcgtgacctacctgttcaaaaacatgctgccgaaagt
gatcgatgaactgaacgaatttgatcgcaacaccaaagcgaaactgatcaacctgatcgatagccacaacattattctggtgggcgaa
gtggataaactgaaagcgaaagttaacaacagcttccagaacaccatcccgtttaacatcttcagctataccaacaacagcctgctgaa
agatatcatcaacgaatacttcaatctagagggcggtggcggtagcggtggcggtggcagcggcggtggcggtagcgcactagtggg
cagctcatttctgtctccggaacatcaacgggtgcagcagcgtaaagagagtaaaaagccgccagcgaaattacagcctcgctaatag
aagcttaagggcgaattc
SEQ ID8 GHRP-C fusion
PITINNFNYSDPVDNKNILYLDTHLNTLANEPEKAFRITGNIWVIPDRFSRNSNPNLNKPPRVTSPK
SGYYDPNYLSTDSDKDTFLKEIIKLFKRINSREIGEELIYRLSTDIPFPGNNNTPINTFDFDVDFNSV
DVKTRQGNNWVKTGSINPSVIITGPRENIIDPETSTFKLTNNTFAAQEGFGALSIISISPRFMLTYSN
ATNDVGEGRFSKSEFCMDPILILMHELNHAMHNLYGIAIPNDQTISSVTSNIFYSQYNVKLEYAEIY
AFGGPTIDLIPKSARKYFEEKALDYYRSIAKRLNSITTANPSSFNKYIGEYKQKLIRKYRFVVESSG
EVTVNRNKFVELYNELTQIFTEFNYAKIYNVQNRKIYLSNVYTPVTANILDDNVYDIQNGFNIPKSN
LNVLFMGQNLSRNPALRKVNPENMLYLFTKFCVDAIDGRSLYNKTLQCRELLVKNTDLPFIGDISD
VKTDIFLRKDINEETEVIYYPDNVSVDQVILSKNTSEHGQLDLLYPSIDSESEILPGENQVFYDNRT
QNVDYLNSYYYLESQKLSDNVEDFTFTRSIEEALDNSAKVYTYFPTLANKVNAGVQGGLFLMWA
NDVVEDFTTNILRKDTLDKISDVSAIIPYIGPALNISNSVRRGNFTEAFAVTGVTILLEAFPEFTIPAL
GAFVIYSKVQERNEIIKTIDNCLEQRIKRWKDSYEWMMGTWLSRIITQFNNISYQMYDSLNYQAG
AIKAKIDLEYKKYSGSDKENIKSQVENLKNSLDVKISEAMNNINKFIRECSVTYLFKNMLPKVIDELN
EFDRNTKAKLINLIDSHNIILVGEVDKLKAKVNNSFQNTIPFNIFSYTNNSLLKDIINEYFNLEGGGG
SGGGGSGGGGSALVGSSFLSPEHQRVQQRKESKKPPAKLQPR
SEQ ID9 GHRH-D fusion
TWPVKDFNYSDPVNDNDILYLRIPQNKLITTPVKAFMITQNIWVIPERFSSDTNPSLSKPPRPTSKY
QSYYDPSYLSTDEQKDTFLKGIIKLFKRINERDIGKKLINYLVVGSPFMGDSSTPEDTFDFTRHTTN
IAVEKFENGSWKVTNIITPSVLIFGPLPNILDYTASLTLQGQQSNPSFEGFGTLSILKVAPEFLLTFS
DVTSNQSSAVLGKSIFCMDPVIALMHELTHSLHQLYGINIPSDKRIRPQVSEGFFSQDGPNVQFE
ELYTFGGLDVEIIPQIERSQLREKALGHYKDIAKRLNNINKTIPSSWISNIDKYKKIFSEKYNFDKDN
TGNFVVNIDKFNSLYSDLTNVMSEVVYSSQYNVKNRTHYFSRHYLPVFANILDDNIYTIRDGFNLT
NKGFNIENSGQNIERNPALQKLSSESVVDLFTKVCVDKSEEKLYDDDDKDRWGSSLQCIKVKNN
RLPYVADKDSISQEIFENKIITDETNVQNYSDKFSLDESILDGQVPINPEIVDPLLPNVNMEPLNLPG
EEIVFYDDITKYVDYLNSYYYLESQKLSNNVENITLTTSVEEALGYSNKIYTFLPSLAEKVNKGVQA
GLFLNWANEVVEDFTTNIMKKDTLDKISDVSVIIPYIGPALNIGNSALRGNFNQAFATAGVAFLLEG
FPEFTIPALGVFTFYSSIQEREKIIKTIENCLEQRVKRWKDSYQWMVSNWLSRITTQFNHINYQMY
DSLSYQADAIKAKIDLEYKKYSGSDKENIKSQVENLKNSLDVKISEAMNNINKFIRECSVTYLFKNM
LPKVIDELNKFDLRTKTELINLIDSHNIILVGEVDRLKAKVNESFENTMPFNIFSYTNNSLLKDIINEY
FNLEGGGGSGGGGSGGGGSALVYADAIFTNSYRKVLGQLSARKLLQDIMSRQQGESNQERGA
SEQ ID10 EGF-D fusion
TWPVKDFNYSDPVNDNDILYLRIPQNKLITTPVKAFMITQNIWVIPERFSSDTNPSLSKPPRPTSKY
QSYYDPSYLSTDEQKDTFLKGIIKLFKRINERDIGKKLINYLVVGSPFMGDSSTPEDTFDFTRHTTN
IAVEKFENGSWKVTNIITPSVLIFGPLPNILDYTASLTLQGQQSNPSFEGFGTLSILKVAPEFLLTFS
DVTSNQSSAVLGKSIFCMDPVIALMHELTHSLHQLYGINIPSDKRIRPQVSEGFFSQDGPNVQFE
ELYTFGGLDVEIIPQIERSQLREKALGHYKDIAKRLNNINKTIPSSWISNIDKYKKIFSEKYNFDKDN
TGNFVVNIDKFNSLYSDLTNVMSEVVYSSQYNVKNRTHYFSRHYLPVFANILDDNIYTIRDGFNLT
NKGFNIENSGQNIERNPALQKLSSESVVDLFTKVCVDKSEEKLYDDDDKDRWGSSLQCIKVKNN
RLPYVADKDSISQEIFENKIITDETNVQNYSDKFSLDESILDGQVPINPEIVDPLLPNVNMEPLNLPG
EEIVFYDDITKYVDYLNSYYYLESQKLSNNVENITLTTSVEEALGYSNKIYTFLPSLAEKVNKGVQA
GLFLNWANEVVEDFTTNIMKKDTLDKISDVSVIIPYIGPALNIGNSALRGNFNQAFATAGVAFLLEG
FPEFTIPALGVFTFYSSIQEREKIIKTIENCLEQRVKRWKDSYQWMVSNWLSRITTQFNHINYQMY
DSLSYQADAIKAKIDLEYKKYSGSDKENIKSQVENLKNSLDVKISEAMNNINKFIRECSVTYLFKNM
LPKVIDELNKFDLRTKTELINLIDSHNIILVGEVDRLKAKVNESFENTMPFNIFSYTNNSLLKDIINEY
FNLEGGGGSGGGGSGGGGSALVNSDSECPLSHDGYCLHDGVCMYIEALDKYACNCVVGYIGE
RCQYRDLKWWELR
SEQ ID11 NGF-D fusion
[sequence omitted]
SEQ ID12 LEP116-122-D fusion
TWPVKDFNYSDPVNDNDILYLRIPQNKLITTPVKAFMITQNIWVIPERFSSDTNPSLSKPPRPTSKY
QSYYDPSYLSTDEQKDTFLKGIIKLFKRINERDIGKKLINYLVVGSPFMGDSSTPEDTFDFTRHTTN
IAVEKFENGSWKVTNIITPSVLIFGPLPNILDYTASLTLQGQQSNPSFEGFGTLSILKVAPEFLLTFS
DVTSNQSSAVLGKSIFCMDPVIALMHELTHSLHQLYGINIPSDKRIRPQVSEGFFSQDGPNVQFE
ELYTFGGLDVEIIPQIERSQLREKALGHYKDIAKRLNNINKTIPSSWISNIDKYKKIFSEKYNFDKDN
TGNFVVNIDKFNSLYSDLTNVMSEVVYSSQYNVKNRTHYFSRHYLPVFANILDDNIYTIRDGFNLT
NKGFNIENSGQNIERNPALQKLSSESVVDLFTKVCVDKSEEKLYDDDDKDRWGSSLQCIKVKNN
RLPYVADKDSISQEIFENKIITDETNVQNYSDKFSLDESILDGQVPINPEIVDPLLPNVNMEPLNLPG
EEIVFYDDITKYVDYLNSYYYLESQKLSNNVENITLTTSVEEALGYSNKIYTFLPSLAEKVNKGVQA
GLFLNWANEVVEDFTTNIMKKDTLDKISDVSVIIPYIGPALNIGNSALRGNFNQAFATAGVAFLLEG
FPEFTIPALGVFTFYSSIQEREKIIKTIENCLEQRVKRWKDSYQWMVSNWLSRITTQFNHINYQMY
DSLSYQADAIKAKIDLEYKKYSGSDKENIKSQVENLKNSLDVKISEAMNNINKFIRECSVTYLFKNM
LPKVIDELNKFDLRTKTELINLIDSHNIILVGEVDRLKAKVNESFENTMPFNIFSYTNNSLLKDIINEY
FNLEGGGGSGGGGSGGGGSALVSCHLPWA
SEQ ID13 VIP-D fusion
TWPVKDFNYSDPVNDNDILYLRIPQNKLITTPVKAFMITQNIWVIPERFSSDTNPSLSKPPRPTSKY
QSYYDPSYLSTDEQKDTFLKGIIKLFKRINERDIGKKLINYLVVGSPFMGDSSTPEDTFDFTRHTTN
IAVEKFENGSWKVTNIITPSVLIFGPLPNILDYTASLTLQGQQSNPSFEGFGTLSILKVAPEFLLTFS
DVTSNQSSAVLGKSIFCMDPVIALMHELTHSLHQLYGINIPSDKRIRPQVSEGFFSQDGPNVQFE
ELYTFGGLDVEIIPQIERSQLREKALGHYKDIAKRLNNINKTIPSSWISNIDKYKKIFSEKYNFDKDN
TGNFVVNIDKFNSLYSDLTNVMSEVVYSSQYNVKNRTHYFSRHYLPVFANILDDNIYTIRDGFNLT
NKGFNIENSGQNIERNPALQKLSSESVVDLFTKVCVDKSEEKLYDDDDKDRWGSSLQCIKVKNN
RLPYVADKDSISQEIFENKIITDETNVQNYSDKFSLDESILDGQVPINPEIVDPLLPNVNMEPLNLPG
EEIVFYDDITKYVDYLNSYYYLESQKLSNNVENITLTTSVEEALGYSNKIYTFLPSLAEKVNKGVQA
GLFLNWANEVVEDFTTNIMKKDTLDKISDVSVIIPYIGPALNIGNSALRGNFNQAFATAGVAFLLEG
FPEFTIPALGVFTFYSSIQEREKIIKTIENCLEQRVKRWKDSYQWMVSNWLSRITTQFNHINYQMY
DSLSYQADAIKAKIDLEYKKYSGSDKENIKSQVENLKNSLDVKISEAMNNINKFIRECSVTYLFKNM
LPKVIDELNKFDLRTKTELINLIDSHNIILVGEVDRLKAKVNESFENTMPFNIFSYTNNSLLKDIINEY
FNLEGGGGSGGGGSGGGGSALVHSDAVFTDNYTRLRKQMAVKKYLNSILN
SEQ ID14 LEP116-122-C fusion
PITINNFNYSDPVDNKNILYLDTHLNTLANEPEKAFRITGNIWVIPDRFSRNSNPNLNKPPRVTSPK
SGYYDPNYLSTDSDKDTFLKEIIKLFKRINSREIGEELIYRLSTDIPFPGNNNTPINTFDFDVDFNSV
DVKTRQGNNWVKTGSINPSVIITGPRENIIDPETSTFKLTNNTFAAQEGFGALSIISISPRFMLTYSN
ATNDVGEGRFSKSEFCMDPILILMHELNHAMHNLYGIAIPNDQTISSVTSNIFYSQYNVKLEYAEIY
AFGGPTIDLIPKSARKYFEEKALDYYRSIAKRLNSITTANPSSFNKYIGEYKQKLIRKYRFVVESSG
EVTVNRNKFVELYNELTQIFTEFNYAKIYNVQNRKIYLSNVYTPVTANILDDNVYDIQNGFNIPKSN
LNVLFMGQNLSRNPALRKVNPENMLYLFTKFCVDAIDGRSLYNKTLQCRELLVKNTDLPFIGDISD
VKTDIFLRKDINEETEVIYYPDNVSVDQVILSKNTSEHGQLDLLYPSIDSESEILPGENQVFYDNRT
QNVDYLNSYYYLESQKLSDNVEDFTFTRSIEEALDNSAKVYTYFPTLANKVNAGVQGGLFLMWA
NDVVEDFTTNILRKDTLDKISDVSAIIPYIGPALNISNSVRRGNFTEAFAVTGVTILLEAFPEFTIPAL
GAFVIYSKVQERNEIIKTIDNCLEQRIKRWKDSYEWMMGTWLSRIITQFNNISYQMYDSLNYQAG
AIKAKIDLEYKKYSGSDKENIKSQVENLKNSLDVKISEAMNNINKFIRECSVTYLFKNMLPKVIDELN
EFDRNTKAKLINLIDSHNIILVGEVDKLKAKVNNSFQNTIPFNIFSYTNNSLLKDIINEYFNLEGGGG
SGGGGSGGGGSALVSCHLPWA
SEQ ID15 IGF1-C fusion
PITINNFNYSDPVDNKNILYLDTHLNTLANEPEKAFRITGNIWVIPDRFSRNSNPNLNKPPRVTSPK
SGYYDPNYLSTDSDKDTFLKEIIKLFKRINSREIGEELIYRLSTDIPFPGNNNTPINTFDFDVDFNSV
DVKTRQGNNWVKTGSINPSVIITGPRENIIDPETSTFKLTNNTFAAQEGFGALSIISISPRFMLTYSN
ATNDVGEGRFSKSEFCMDPILILMHELNHAMHNLYGIAIPNDQTISSVTSNIFYSQYNVKLEYAEIY
AFGGPTIDLIPKSARKYFEEKALDYYRSIAKRLNSITTANPSSFNKYIGEYKQKLIRKYRFVVESSG
EVTVNRNKFVELYNELTQIFTEFNYAKIYNVQNRKIYLSNVYTPVTANILDDNVYDIQNGFNIPKSN
LNVLFMGQNLSRNPALRKVNPENMLYLFTKFCVDAIDGRSLYNKTLQCRELLVKNTDLPFIGDISD
VKTDIFLRKDINEETEVIYYPDNVSVDQVILSKNTSEHGQLDLLYPSIDSESEILPGENQVFYDNRT
QNVDYLNSYYYLESQKLSDNVEDFTFTRSIEEALDNSAKVYTYFPTLANKVNAGVQGGLFLMWA
NDVVEDFTTNILRKDTLDKISDVSAIIPYIGPALNISNSVRRGNFTEAFAVTGVTILLEAFPEFTIPAL
GAFVIYSKVQERNEIIKTIDNCLEQRIKRWKDSYEWMMGTWLSRIITQFNNISYQMYDSLNYQAG
AIKAKIDLEYKKYSGSDKENIKSQVENLKNSLDVKISEAMNNINKFIRECSVTYLFKNMLPKVIDELN
EFDRNTKAKLINLIDSHNIILVGEVDKLKAKVNNSFQNTIPFNIFSYTNNSLLKDIINEYFNLEGGGG
SGGGGSGGGGSALVGPETLCGAELVDALQFVCGDRGFYFNKPTGYGSSSRRAPQTGIVDECC
FRSCDLRRLEMYCAPLKPAKSA
SEQ ID16 SST-C fusion
PITINNFNYSDPVDNKNILYLDTHLNTLANEPEKAFRITGNIWVIPDRFSRNSNPNLNKPPRVTSPK
SGYYDPNYLSTDSDKDTFLKEIIKLFKRINSREIGEELIYRLSTDIPFPGNNNTPINTFDFDVDFNSV
DVKTRQGNNWVKTGSINPSVIITGPRENIIDPETSTFKLTNNTFAAQEGFGALSIISISPRFMLTYSN
ATNDVGEGRFSKSEFCMDPILILMHELNHAMHNLYGIAIPNDQTISSVTSNIFYSQYNVKLEYAEIY
AFGGPTIDLIPKSARKYFEEKALDYYRSIAKRLNSITTANPSSFNKYIGEYKQKLIRKYRFVVESSG
EVTVNRNKFVELYNELTQIFTEFNYAKIYNVQNRKIYLSNVYTPVTANILDDNVYDIQNGFNIPKSN
LNVLFMGQNLSRNPALRKVNPENMLYLFTKFCVDAIDGRSLYNKTLQCRELLVKNTDLPFIGDISD
VKTDIFLRKDINEETEVIYYPDNVSVDQVILSKNTSEHGQLDLLYPSIDSESEILPGENQVFYDNRT
QNVDYLNSYYYLESQKLSDNVEDFTFTRSIEEALDNSAKVYTYFPTLANKVNAGVQGGLFLMWA
NDVVEDFTTNILRKDTLDKISDVSAIIPYIGPALNISNSVRRGNFTEAFAVTGVTILLEAFPEFTIPAL
GAFVIYSKVQERNEIIKTIDNCLEQRIKRWKDSYEWMMGTWLSRIITQFNNISYQMYDSLNYQAG
AIKAKIDLEYKKYSGSDKENIKSQVENLKNSLDVKISEAMNNINKFIRECSVTYLFKNMLPKVIDELN
EFDRNTKAKLINLIDSHNIILVGEVDKLKAKVNNSFQNTIPFNIFSYTNNSLLKDIINEYFNLEGGGG
SGGGGSGGGGSGGGGSGGGGSGGGGSGGGGSALVAGCKNFFWKTFTSC
SEQ ID17 GHRP-D fusion
TWPVKDFNYSDPVNDNDILYLRIPQNKLITTPVKAFMITQNIWVIPERFSSDTNPSLSKPPRPTSKY
QSYYDPSYLSTDEQKDTFLKGIIKLFKRINERDIGKKLINYLVVGSPFMGDSSTPEDTFDFTRHTTN
IAVEKFENGSWKVTNIITPSVLIFGPLPNILDYTASLTLQGQQSNPSFEGFGTLSILKVAPEFLLTFS
DVTSNQSSAVLGKSIFCMDPVIALMHELTHSLHQLYGINIPSDKRIRPQVSEGFFSQDGPNVQFE
ELYTFGGLDVEIIPQIERSQLREKALGHYKDIAKRLNNINKTIPSSWISNIDKYKKIFSEKYNFDKDN
TGNFVVNIDKFNSLYSDLTNVMSEVVYSSQYNVKNRTHYFSRHYLPVFANILDDNIYTIRDGFNLT
NKGFNIENSGQNIERNPALQKLSSESVVDLFTKVCVDKSEEKLYDDDDKDRWGSSLQCIKVKNN
RLPYVADKDSISQEIFENKIITDETNVQNYSDKFSLDESILDGQVPINPEIVDPLLPNVNMEPLNLPG
EEIVFYDDITKYVDYLNSYYYLESQKLSNNVENITLTTSVEEALGYSNKIYTFLPSLAEKVNKGVQA
GLFLNWANEVVEDFTTNIMKKDTLDKISDVSVIIPYIGPALNIGNSALRGNFNQAFATAGVAFLLEG
FPEFTIPALGVFTFYSSIQEREKIIKTIENCLEQRVKRWKDSYQWMVSNWLSRITTQFNHINYQMY
DSLSYQADAIKAKIDLEYKKYSGSDKENIKSQVENLKNSLDVKISEAMNNINKFIRECSVTYLFKNM
LPKVIDELNKFDLRTKTELINLIDSHNIILVGEVDRLKAKVNESFENTMPFNIFSYTNNSLLKDIINEY
FNLEGGGGSGGGGSGGGGSALVGSSFLSPEHQRVQQRKESKKPPAKLQPR
SEQ ID18 IGF1-D fusion
TWPVKDFNYSDPVNDNDILYLRIPQNKLITTPVKAFMITQNIWVIPERFSSDTNPSLSKPPRPTSKY
QSYYDPSYLSTDEQKDTFLKGIIKLFKRINERDIGKKLINYLVVGSPFMGDSSTPEDTFDFTRHTTN
IAVEKFENGSWKVTNIITPSVLIFGPLPNILDYTASLTLQGQQSNPSFEGFGTLSILKVAPEFLLTFS
DVTSNQSSAVLGKSIFCMDPVIALMHELTHSLHQLYGINIPSDKRIRPQVSEGFFSQDGPNVQFE
ELYTFGGLDVEIIPQIERSQLREKALGHYKDIAKRLNNINKTIPSSWISNIDKYKKIFSEKYNFDKDN
TGNFVVNIDKFNSLYSDLTNVMSEVVYSSQYNVKNRTHYFSRHYLPVFANILDDNIYTIRDGFNLT
NKGFNIENSGQNIERNPALQKLSSESVVDLFTKVCVDKSEEKLYDDDDKDRWGSSLQCIKVKNN
RLPYVADKDSISQEIFENKIITDETNVQNYSDKFSLDESILDGQVPINPEIVDPLLPNVNMEPLNLPG
EEIVFYDDITKYVDYLNSYYYLESQKLSNNVENITLTTSVEEALGYSNKIYTFLPSLAEKVNKGVQA
GLFLNWANEVVEDFTTNIMKKDTLDKISDVSVIIPYIGPALNIGNSALRGNFNQAFATAGVAFLLEG
FPEFTIPALGVFTFYSSIQEREKIIKTIENCLEQRVKRWKDSYQWMVSNWLSRITTQFNHINYQMY
DSLSYQADAIKAKIDLEYKKYSGSDKENIKSQVENLKNSLDVKISEAMNNINKFIRECSVTYLFKNM
LPKVIDELNKFDLRTKTELINLIDSHNIILVGEVDRLKAKVNESFENTMPFNIFSYTNNSLLKDIINEY
FNLEGGGGSGGGGSGGGGSALVGPETLCGAELVDALQFVCGDRGFYFNKPTGYGSSSRRAPQ
TGIVDECCFRSCDLRRLEMYCAPLKPAKSA
SEQ ID19 NGF-C fusion
PITINNFNYSDPVDNKNILYLDTHLNTLANEPEKAFRITGNIWVIPDRFSRNSNPNLNKPPRVTSPK
SGYYDPNYLSTDSDKDTFLKEIIKLFKRINSREIGEELIYRLSTDIPFPGNNNTPINTFDFDVDFNSV
DVKTRQGNNWVKTGSINPSVIITGPRENIIDPETSTFKLTNNTFAAQEGFGALSIISISPRFMLTYSN
ATNDVGEGRFSKSEFCMDPILILMHELNHAMHNLYGIAIPNDQTISSVTSNIFYSQYNVKLEYAEIY
AFGGPTIDLIPKSARKYFEEKALDYYRSIAKRLNSITTANPSSFNKYIGEYKQKLIRKYRFVVESSG
EVTVNRNKFVELYNELTQIFTEFNYAKIYNVQNRKIYLSNVYTPVTANILDDNVYDIQNGFNIPKSN
LNVLFMGQNLSRNPALRKVNPENMLYLFTKFCVDAIDGRSLYNKTLQCRELLVKNTDLPFIGDISD
VKTDIFLRKDINEETEVIYYPDNVSVDQVILSKNTSEHGQLDLLYPSIDSESEILPGENQVFYDNRT
QNVDYLNSYYYLESQKLSDNVEDFTFTRSIEEALDNSAKVYTYFPTLANKVNAGVQGGLFLMWA
NDVVEDFTTNILRKDTLDKISDVSAIIPYIGPALNISNSVRRGNFTEAFAVTGVTILLEAFPEFTIPAL
GAFVIYSKVQERNEIIKTIDNCLEQRIKRWKDSYEWMMGTWLSRIITQFNNISYQMYDSLNYQAG
AIKAKIDLEYKKYSGSDKENIKSQVENLKNSLDVKISEAMNNINKFIRECSVTYLFKNMLPKVIDELN
EFDRNTKAKLINLIDSHNIILVGEVDKLKAKVNNSFQNTIPFNIFSYTNNSLLKDIINEYFNLEGGGG
SGGGGSGGGGSALVEPHSESNVPAGHTIPQAHWTKLQHSLDTALRRARSAPAAAIAARVAGQT
RNITVDPRLFKKRRLRSPRVLFSTQPPREAADTQDLDFEVGGAAPFNRTHRSKRSSSHPIFHRG
EFSVCDSVSVWVGDKTTATDIKGKEVMVLGEVNINNSVFKQYFFETKCRDPNPVDSGCRGIDSK
HWNSYCTTTHTFVKALTMDGKQAAWRFIRIDTACVCVLSRKAVRRA
SEQ ID20 SST14-D fusion
TWPVKDFNYSDPVNDNDILYLRIPQNKLITTPVKAFMITQNIWVIPERFSSDTNPSLSKPPRPTSKY
QSYYDPSYLSTDEQKDTFLKGIIKLFKRINERDIGKKLINYLVVGSPFMGDSSTPEDTFDFTRHTTN
IAVEKFENGSWKVTNIITPSVLIFGPLPNILDYTASLTLQGQQSNPSFEGFGTLSILKVAPEFLLTFS
DVTSNQSSAVLGKSIFCMDPVIALMHELTHSLHQLYGINIPSDKRIRPQVSEGFFSQDGPNVQFE
ELYTFGGLDVEIIPQIERSQLREKALGHYKDIAKRLNNINKTIPSSWISNIDKYKKIFSEKYNFDKDN
TGNFVVNIDKFNSLYSDLTNVMSEVVYSSQYNVKNRTHYFSRHYLPVFANILDDNIYTIRDGFNLT
NKGFNIENSGQNIERNPALQKLSSESVVDLFTKVCVDKSEEKLYDDDDKDRWGSSLQCIKVKNN
RLPYVADKDSISQEIFENKIITDETNVQNYSDKFSLDESILDGQVPINPEIVDPLLPNVNMEPLNLPG
EEIVFYDDITKYVDYLNSYYYLESQKLSNNVENITLTTSVEEALGYSNKIYTFLPSLAEKVNKGVQA
GLFLNWANEVVEDFTTNIMKKDTLDKISDVSVIIPYIGPALNIGNSALRGNFNQAFATAGVAFLLEG
FPEFTIPALGVFTFYSSIQEREKIIKTIENCLEQRVKRWKDSYQWMVSNWLSRITTQFNHINYQMY
DSLSYQADAIKAKIDLEYKKYSGSDKENIKSQVENLKNSLDVKISEAMNNINKFIRECSVTYLFKNM
LPKVIDELNKFDLRTKTELINLIDSHNIILVGEVDRLKAKVNESFENTMPFNIFSYTNNSLLKDIINEY
FNLEGGGGSGGGGSGGGGSGGGGSALVAGCKNFFWKTFTSC
SEQ ID21 VIP-C fusion
PITINNFNYSDPVDNKNILYLDTHLNTLANEPEKAFRITGNIWVIPDRFSRNSNPNLNKPPRVTSPK
SGYYDPNYLSTDSDKDTFLKEIIKLFKRINSREIGEELIYRLSTDIPFPGNNNTPINTFDFDVDFNSV
DVKTRQGNNWVKTGSINPSVIITGPRENIIDPETSTFKLTNNTFAAQEGFGALSIISISPRFMLTYSN
ATNDVGEGRFSKSEFCMDPILILMHELNHAMHNLYGIAIPNDQTISSVTSNIFYSQYNVKLEYAEIY
AFGGPTIDLIPKSARKYFEEKALDYYRSIAKRLNSITTANPSSFNKYIGEYKQKLIRKYRFVVESSG
EVTVNRNKFVELYNELTQIFTEFNYAKIYNVQNRKIYLSNVYTPVTANILDDNVYDIQNGFNIPKSN
LNVLFMGQNLSRNPALRKVNPENMLYLFTKFCVDAIDGRSLYNKTLQCRELLVKNTDLPFIGDISD
VKTDIFLRKDINEETEVIYYPDNVSVDQVILSKNTSEHGQLDLLYPSIDSESEILPGENQVFYDNRT
QNVDYLNSYYYLESQKLSDNVEDFTFTRSIEEALDNSAKVYTYFPTLANKVNAGVQGGLFLMWA
NDVVEDFTTNILRKDTLDKISDVSAIIPYIGPALNISNSVRRGNFTEAFAVTGVTILLEAFPEFTIPAL
GAFVIYSKVQERNEIIKTIDNCLEQRIKRWKDSYEWMMGTWLSRIITQFNNISYQMYDSLNYQAG
AIKAKIDLEYKKYSGSDKENIKSQVENLKNSLDVKISEAMNNINKFIRECSVTYLFKNMLPKVIDELN
EFDRNTKAKLINLIDSHNIILVGEVDKLKAKVNNSFQNTIPFNIFSYTNNSLLKDIINEYFNLEGGGG
SGGGGSGGGGSALVHSDAVFTDNYTRLRKQMAVKKYLNSILN
SEQ ID22 ghrelin-A fusion
EFVNKQFNYKDPVNGVDIAYIKIPNAGQMQPVKAFKIHNKIWVIPERDTFTNPEEGDLNPPPEAKQ
VPVSYYDSTYLSTDNEKDNYLKGVTKLFERIYSTDLGRMLLTSIVRGIPFWGGSTIDTELKVIDTNC
INVIQPDGSYRSEELNLVIIGPSADIIQFECKSFGHEVLNLTRNGYGSTQYIRFSPDFTFGFEESLE
VDTNPLLGAGKFATDPAVTLAHELIHAGHRLYGIAINPNRVFKVNTNAYYEMSGLEVSFEELRTFG
GHDAKFIDSLQENEFRLYYYNKFKDIASTLNKAKSIVGTTASLQYMKNVFKEKYLLSEDTSGKFSV
DKLKFDKLYKMLTEIYTEDNFVKFFKVLNRKTYLNFDKAVFKINIVPKVNYTIYDGFNLRNTNLAAN
FNGQNTEINNMNFTKLKNFTGLFEFYKLLCVDGIITSKTKSDDDDKNKALNLQCIKVNNWDLFFSP
SEDNFTNDLNKGEEITSDTNIEAAEENISLDLIQQYYLTFNFDNEPENISIENLSSDIIGQLELMPNIE
RFPNGKKYELDKYTMFHYLRAQEFEHGKSRIALTNSVNEALLNPSRVYTFFSSDYVKKVNKATEA
AMFLGWVEQLVYDFTDETSEVSTTDKIADITIIIPYIGPALNIGNMLYKDDFVGALIFSGAVILLEFIPE
IAIPVLGTFALVSYIANKVLTVQTIDNALSKRNEKWDEVYKYIVTNWLAKVNTQIDLIRKKMKEALEN
QAEATKAIINYQYNQYTEEEKNNINFNIDDLSSKLNESINKAMININKFLNQCSVSYLMNSMIPYGV
KRLEDFDASLKDALLKYIYDNRGTLIGQVDRLKDKVNNTLSTDIPFQLSKYVDNQRLLSTLEGGGG
SGGGGSGGGGSALVGSSFLSPEHQRVQQRKESKKPPAKLQPR
SEQ ID23 Protein sequence of the CP-hGHRH29 N8A K12N M27L-LHD fusion
TWPVKDFNYSDPVNDNDILYLRIPQNKLITTPVKAFMITQNIWVIPERFSSDTNPSLSKPPRPTSKYQ
SYYDPSYLSTDEQKDTFLKGIIKLFKRINERDIGKKLINYLVVGSPFMGDSSTPEDTFDFTRHTTNIAV
EKFENGSWKVTNIITPSVLIFGPLPNILDYTASLTLQGQQSNPSFEGFGTLSILKVAPEFLLTFSDVTS
NQSSAVLGKSIFCMDPVIALMHELTHSLHQLYGINIPSDKRIRPQVSEGFFSQDGPNVQFEELYTFG
GLDVEIIPQIERSQLREKALGHYKDIAKRLNNINKTIPSSWISNIDKYKKIFSEKYNFDKDNTGNFVVNI
DKFNSLYSDLTNVMSEVVYSSQYNVKNRTHYFSRHYLPVFANILDDNIYTIRDGFNLTNKGFNIENS
GQNIERNPALQKLSSESVVDLFTKVCVDGIITSKTKSIEGRYADAIFTASYRNVLGQLSARKLLQDILS
RALAGGGGSGGGGSGGGGSALALQCIKVKNNRLPYVADKDSISQEIFENKIITDETNVQNYSDKFS
LDESILDGQVPINPEIVDPLLPNVNMEPLNLPGEEIVFYDDITKYVDYLNSYYYLESQKLSNNVENITL
TTSVEEALGYSNKIYTFLPSLAEKVNKGVQAGLFLNWANEVVEDFTTNIMKKDTLDKISDVSVIIPYIG
PALNIGNSALRGNFNQAFATAGVAFLLEGFPEFTIPALGVFTFYSSIQEREKIIKTIENCLEQRVKRWK
DSYQWMVSNWLSRITTQFNHINYQMYDSLSYQADAIKAKIDLEYKKYSGSDKENIKSQVENLKNSL
DVKISEAMNNINKFIRECSVTYLFKNMLPKVIDELNKFDLRTKTELINLIDSHNIILVGEVDRLKAKVNE
SFENTMPFNIFSYTNNSLLKDIINEYFN
SEQ ID24 Protein sequence N-termianal-hGHRH29 N8A M27L-LHD fusion
HVDAIFTQSYRKVLAQLSARKLLQDILNRNNNNNNNNNNTWPVKDFNYSDPVNDNDILYLRIPQNKL
ITTPVKAFMITQNIWVIPERFSSDTNPSLSKPPRPTSKYQSYYDPSYLSTDEQKDTFLKGIIKLFKRIN
ERDIGKKLINYLVVGSPFMGDSSTPEDTFDFTRHTTNIAVEKFENGSWKVTNIITPSVLIFGPLPNILD
YTASLTLQGQQSNPSFEGFGTLSILKVAPEFLLTFSDVTSNQSSAVLGKSIFCMDPVIALMHELTHSL
HQLYGINIPSDKRIRPQVSEGFFSQDGPNVQFEELYTFGGLDVEIIPQIERSQLREKALGHYKDIAKR
LNNINKTIPSSWISNIDKYKKIFSEKYNFDKDNTGNFVVNIDKFNSLYSDLTNVMSEVVYSSQYNVKN
RTHYFSRHYLPVFANILDDNIYTIRDGFNLTNKGFNIENSGQNIERNPALQKLSSESVVDLFTKVCVD
KSEEKLYDDDDKDRWGSSLQCIKVKNNRLPYVADKDSISQEIFENKIITDETNVQNYSDKFSLDESIL
DGQVPINPEIVDPLLPNVNMEPLNLPGEEIVFYDDITKYVDYLNSYYYLESQKLSNNVENITLTTSVE
EALGYSNKIYTFLPSLAEKVNKGVQAGLFLNWANEVVEDFTTNIMKKDTLDKISDVSVIIPYIGPALNI
GNSALRGNFNQAFATAGVAFLLEGFPEFTIPALGVFTFYSSIQEREKIIKTIENCLEQRVKRWKDSYQ
WMVSNWLSRITTQFNHINYQMYDSLSYQADAIKAKIDLEYKKYSGSDKENIKSQVENLKNSLDVKIS
EAMNNINKFIRECSVTYLFKNMLPKVIDELNKFDLRTKTELINLIDSHNIILVGEVDRLKAKVNESFENT
MPFNIFSYTNNSLLKDIINEYFN
SEQ ID25 IgA-H_{N}tet-SST14 fusion
ESNQPEKNGTATKPENSGNTTSENGQTEPEKKLELRNVSDIELYSQTNGTYRQHVSLDGIPENTDT
YFVKVKSSAFKDVYIPVASITEEKRNGQSVYKITAKAEKLQQELENKYVDNFTFYLDKKAKEENTNF
TSFSNLVKAINQNPSGTYHLAASLNANEVELGPDERSYIKDTFTGRLIGEKDGKNYAIYNLKKPLFEN
LSGATVEKLSLKNVAISGKNDIGSLANEATNGTKIKQVHVDGCVDGIITSKTKSDDDDKNKALNLQCI
KIKNEDLTFIAEKNSFSEEPFQDEIVSYNTKNKPLNFNYSLDKIIVDYNLQSKITLPNDRTTPVTKGIPY
APEYKSNAASTIEIHNIDDNTIYQYLYAQKSPTTLQRITMTNSVDDALINSTKIYSYFPSVISKVNQGA
QGILFLQWVRDIIDDFTNESSQKTTIDKISDVSTIVPYIGPALNIVKQGYEGNFIGALETTGVVLLLEYIP
EITLPVIAALSIAESSTQKEKIIKTIDNFLEKRYEKWIEVYKLVKAKWLGTVNTQFQKRSYQMYRSLEY
QVDAIKKIIDYEYKIYSGPDKEQIADEINNLKNKLEEKANKAMININIFMRESSRSFLVNQMINEAKKQL
LEFDTQSKNILMQYIKANSKFIGITELKKLESKINKVFSTPIPFSYSKNLDCWVDNEEDIDVLEGGGGS
GGGGSGGGGSALVAGCKNFFWKTFTSC
SEQ ID26 IgA-H_{N}tet-GHRP fusion
ESNQPEKNGTATKPENSGNTTSENGQTEPEKKLELRNVSDIELYSQTNGTYRQHVSLDGIPENTDT
YFVKVKSSAFKDVYIPVASITEEKRNGQSVYKITAKAEKLQQELENKYVDNFTFYLDKKAKEENTNF
TSFSNLVKAINQNPSGTYHLAASLNANEVELGPDERSYIKDTFTGRLIGEKDGKNYAIYNLKKPLFEN
LSGATVEKLSLKNVAISGKNDIGSLANEATNGTKIKQVHVDGCVDGIITSKTKSDDDDKNKALNLQCI
KIKNEDLTFIAEKNSFSEEPFQDEIVSYNTKNKPLNFNYSLDKIIVDYNLQSKITLPNDRTTPVTKGIPY
APEYKSNAASTIEIHNIDDNTIYQYLYAQKSPTTLQRITMTNSVDDALINSTKIYSYFPSVISKVNQGA
QGILFLQWVRDIIDDFTNESSQKTTIDKISDVSTIVPYIGPALNIVKQGYEGNFIGALETTGVVLLLEYIP
EITLPVIAALSIAESSTQKEKIIKTIDNFLEKRYEKWIEVYKLVKAKWLGTVNTQFQKRSYQMYRSLEY
QVDAIKKIIDYEYKIYSGPDKEQIADEINNLKNKLEEKANKAMININIFMRESSRSFLVNQMINEAKKQL
LEFDTQSKNILMQYIKANSKFIGITELKKLESKINKVFSTPIPFSYSKNLDCWVDNEEDIDVLEGGGGS
GGGGSGGGGSALVGSSFLSPEHQRVQQRKESKKPPAKLQPR
SEQ ID27 ghrelin S3W-A fusion
EFVNKQFNYKDPVNGVDIAYIKIPNAGQMQPVKAFKIHNKIWVIPERDTFTNPEEGDLNPPPEAKQV
PVSYYDSTYLSTDNEKDNYLKGVTKLFERIYSTDLGRMLLTSIVRGIPFWGGSTIDTELKVIDTNCINV
IQPDGSYRSEELNLVIIGPSADIIQFECKSFGHEVLNLTRNGYGSTQYIRFSPDFTFGFEESLEVDTN
PLLGAGKFATDPAVTLAHELIHAGHRLYGIAINPNRVFKVNTNAYYEMSGLEVSFEELRTFGGHDAK
FIDSLQENEFRLYYYNKFKDIASTLNKAKSIVGTTASLQYMKNVFKEKYLLSEDTSGKFSVDKLKFDK
LYKMLTEIYTEDNFVKFFKVLNRKTYLNFDKAVFKINIVPKVNYTIYDGFNLRNTNLAANFNGQNTEIN
NMNFTKLKNFTGLFEFYKLLCVDGIITSKTKSDDDDKNKALNLQCIKVNNWDLFFSPSEDNFTNDLN
KGEEITSDTNIEAAEENISLDLIQQYYLTFNFDNEPENISIENLSSDIIGQLELMPNIERFPNGKKYELD
KYTMFHYLRAQEFEHGKSRIALTNSVNEALLNPSRVYTFFSSDYVKKVNKATEAAMFLGWVEQLVY
DFTDETSEVSTTDKIADITIIIPYIGPALNIGNMLYKDDFVGALIFSGAVILLEFIPEIAIPVLGTFALVSYIA
NKVLTVQTIDNALSKRNEKWDEVYKYIVTNWLAKVNTQIDLIRKKMKEALENQAEATKAIINYQYNQY
TEEEKNNINFNIDDLSSKLNESINKAMININKFLNQCSVSYLMNSMIPYGVKRLEDFDASLKDALLKYI
YDNRGTLIGQVDRLKDKVNNTLSTDIPFQLSKYVDNQRLLSTLEIYALVGSWFLSPEHQRVQQRKE
SKKPPAKLQPR
SEQ ID28 SST28-D fusion
TWPVKDFNYSDPVNDNDILYLRIPQNKLITTPVKAFMITQNIWVIPERFSSDTNPSLSKPPRPTSKY
QSYYDPSYLSTDEQKDTFLKGIIKLFKRINERDIGKKLINYLVVGSPFMGDSSTPEDTFDFTRHTTN
IAVEKFENGSWKVTNIITPSVLIFGPLPNILDYTASLTLQGQQSNPSFEGFGTLSILKVAPEFLLTFS
DVTSNQSSAVLGKSIFCMDPVIALMHELTHSLHQLYGINIPSDKRIRPQVSEGFFSQDGPNVQFE
ELYTFGGLDVEIIPQIERSQLREKALGHYKDIAKRLNNINKTIPSSWISNIDKYKKIFSEKYNFDKDN
TGNFVVNIDKFNSLYSDLTNVMSEVVYSSQYNVKNRTHYFSRHYLPVFANILDDNIYTIRDGFNLT
NKGFNIENSGQNIERNPALQKLSSESVVDLFTKVCVDKSEEKLYDDDDKDRWGSSLQCIKVKNN
RLPYVADKDSISQEIFENKIITDETNVQNYSDKFSLDESILDGQVPINPEIVDPLLPNVNMEPLNLPG
EEIVFYDDITKYVDYLNSYYYLESQKLSNNVENITLTTSVEEALGYSNKIYTFLPSLAEKVNKGVQA
GLFLNWANEVVEDFTTNIMKKDTLDKISDVSVIIPYIGPALNIGNSALRGNFNQAFATAGVAFLLEG
FPEFTIPALGVFTFYSSIQEREKIIKTIENCLEQRVKRWKDSYQWMVSNWLSRITTQFNHINYQMY
DSLSYQADAIKAKIDLEYKKYSGSDKENIKSQVENLKNSLDVKISEAMNNINKFIRECSVTYLFKNM
LPKVIDELNKFDLRTKTELINLIDSHNIILVGEVDRLKAKVNESFENTMPFNIFSYTNNSLLKDIINEY
FNLEGGGGSGGGGSGGGGSGGGGSGGGGSALVSANSNPAMAPRERKAGCKNFFWKTFTSC
SEQ ID29 GRP-D fusion
TWPVKDFNYSDPVNDNDILYLRIPQNKLITTPVKAFMITQNIWVIPERFSSDTNPSLSKPPRPTSKY
QSYYDPSYLSTDEQKDTFLKGIIKLFKRINERDIGKKLINYLVVGSPFMGDSSTPEDTFDFTRHTTN
IAVEKFENGSWKVTNIITPSVLIFGPLPNILDYTASLTLQGQQSNPSFEGFGTLSILKVAPEFLLTFS
DVTSNQSSAVLGKSIFCMDPVIALMHELTHSLHQLYGINIPSDKRIRPQVSEGFFSQDGPNVQFE
ELYTFGGLDVEIIPQIERSQLREKALGHYKDIAKRLNNINKTIPSSWISNIDKYKKIFSEKYNFDKDN
TGNFVVNIDKFNSLYSDLTNVMSEVVYSSQYNVKNRTHYFSRHYLPVFANILDDNIYTIRDGFNLT
NKGFNIENSGQNIERNPALQKLSSESVVDLFTKVCVDKSEEKLYDDDDKDRWGSSLQCIKVKNN
RLPYVADKDSISQEIFENKIITDETNVQNYSDKFSLDESILDGQVPINPEIVDPLLPNVNMEPLNLPG
EEIVFYDDITKYVDYLNSYYYLESQKLSNNVENITLTTSVEEALGYSNKIYTFLPSLAEKVNKGVQA
GLFLNWANEVVEDFTTNIMKKDTLDKISDVSVIIPYIGPALNIGNSALRGNFNQAFATAGVAFLLEG
FPEFTIPALGVFTFYSSIQEREKIIKTIENCLEQRVKRWKDSYQWMVSNWLSRITTQFNHINYQMY
DSLSYQADAIKAKIDLEYKKYSGSDKENIKSQVENLKNSLDVKISEAMNNINKFIRECSVTYLFKNM
LPKVIDELNKFDLRTKTELINLIDSHNIILVGEVDRLKAKVNESFENTMPFNIFSYTNNSLLKDIINEY
FNLEGGGGSGGGGSGGGGSALVGNHWAVGHLM
SEQ ID30 GRP-B fusion
PVTINNFNYNDPIDNNNIIMMEPPFARGTGRYYKAFKITDRIWIIPERYTFGYKPEDFNKSSGIFNR
DVCEYYDPDYLNTNDKKNIFLQTMIKLFNRIKSKPLGEKLLEMIINGIPYLGDRRVPLEEFNTNIASV
TVNKLISNPGEVERKKGIFANLIIFGPGPVLNENETIDIGIQNHFASREGFGGIMQMKFCPEYVSVF
NNVQENKGASIFNRRGYFSDPALILMHELIHVLHGLYGIKVDDLPIVPNEKKFFMQSTDAIQAEELY
TFGGQDPSIITPSTDKSIYDKVLQNFRGIVDRLNKVLVCISDPNININIYKNKFKDKYKFVEDSEGKY
SIDVESFDKLYKSLMFGFTETNIAENYKIKTRASYFSDSLPPVKIKNLLDNEIYTIEEGFNISDKDME
KEYRGQNKAINKQAYEEISKEHLAVYKIQMCVDEEKLYDDDDKDRWGSSLQCIDVDNEDLFFIAD
KNSFSDDLSKNERIEYNTQSNYIENDFPINELILDTDLISKIELPSENTESLTDFNVDVPVYEKQPAI
KKIFTDENTIFQYLYSQTFPLDIRDISLTSSFDDALLFSNKVYSFFSMDYIKTANKVVEAGLFAGWV
KQIVNDFVIEANKSNTMDAIADISLIVPYIGLALNVGNETAKGNFENAFEIAGASILLEFIPELLIPVVG
AFLLESYIDNKNKIIKTIDNALTKRNEKWSDMYGLIVAQWLSTVNTQFYTIKEGMYKALNYQAQAL
EEIIKYRYNIYSEKEKSNINIDFNDINSKLNEGINQAIDNINNFINGCSVSYLMKKMIPLAVEKLLDFD
NTLKKNLLNYIDENKLYLIGSAEYEKSKVNKYLKTIMPFDLSIYTNDTILIEMFNKYNSLEGGGGSG
GGGSGGGGSALVGNHWAVGHLM
SEQ ID31 CP-qGHRH29 linker
ggatccGTCGACaacaacaataacaacaacaataacaacaacgacgatgacgataaaCATGTGGATGCGATCTTT
ACCCAGAGCTATCGGAAGGTTTTGGCCCAACTGTCTGCTCGTAAACTTTTACAGGACATTCT
GAACAGAGCAgaagcggcagccaaagaagcagccgctaaggcgctgcagagtctagaataataagctt
SEQ ID32 CP-qGHRH29-D fusion
ggatccatgacgtggccagttaaggatttcaactactcagatcctgtaaatgacaacgatattctgtaccttcgcattccacaaaataaact
gatcaccacaccagtcaaagcattcatgattactcaaaacatttgggtcattccagaacgcttttctagtgacacaaatccgagtttatctaa
acctccgcgtccgacgtccaaatatcagagctattacgatccctcatatctcagtacggacgaacaaaaagatactttccttaaaggtatc
attaaactgtttaagcgtattaatgagcgcgatatcgggaaaaagttgattaattatcttgttgtgggttccccgttcatgggcgatagctctac
ccccgaagacacttttgattttacccgtcatacgacaaacatcgcggtagagaagtttgagaacggatcgtggaaagtcacaaacatca
ttacacctagcgtcttaatttttggtccgctgccaaacatcttagattatacagccagcctgactttgcaggggcaacagtcgaatccgagttt
cgaaggttttggtaccctgagcattctgaaagttgccccggaatttctgctcactttttcagatgtcaccagcaaccagagctcagcagtatt
aggaaagtcaattttttgcatggacccggttattgcactgatgcacgaactgacgcactctctgcatcaactgtatgggatcaacatcccca
gtgacaaacgtattcgtccccaggtgtctgaaggatttttctcacaggatgggccgaacgtccagttcgaagagttgtatactttcggaggc
ctggacgtagagatcattccccagattgagcgcagtcagctgcgtgagaaggcattgggccattataaggatattgcaaaacgcctgaa
taacattaacaaaacgattccatcttcgtggatctcgaatattgataaatataagaaaatttttagcgagaaatataattttgataaagataat
acaggtaactttgtggttaacattgacaaattcaactccctttacagtgatttgacgaatgtaatgagcgaagttgtgtatagttcccaataca
acgttaagaatcgtacccattacttctctcgtcactacctgccggttttcgcgaacatccttgacgataatatttacactattcgtgacggct
ttaacttgaccaacaagggcttcaatattgaaaattcaggccagaacattgaacgcaacccggccttgcagaaactgtcgagtgaatccgt
ggttgacctgtttaccaaagtctgcGTCGACaacaacaataacaacaacaataacaacaacgacgatgacgataaaCATGTG
GATGCGATCTTTACCCAGAGCTATCGGAAGGTTTTGGCCCAACTGTCTGCTCGTAAACTTTT
ACAGGACATTCTGAACAGAGCAgaagcggcagccaaagaagcagccgctaaggcgctgcagtgtattaaagtgaaa
aacaatcggctgccttatgtagcagataaagatagcattagtcaggagattttcgaaaataaaattatcactgacgaaaccaatgttcag
aattattcagataaattttcactggacgaaagcatcttagatggccaagttccgattaacccggaaattgttgatccgttactgccgaacgtg
aatatggaaccgttaaacctccctggcgaagagatcgtattttatgatgacattacgaaatatgtggactaccttaattcttattactatttgga
aagccagaaactgtccaataacgtggaaaacattactctgaccacaagcgtggaagaggctttaggctactcaaataagatttatacctt
cctcccgtcgctggcggaaaaagtaaataaaggtgtgcaggctggtctgttcctcaactgggcgaatgaagttgtcgaagactttaccac
gaatattatgaaaaaggataccctggataaaatctccgacgtctcggttattatcccatatattggccctgcgttaaatatcggtaatagtgc
gctgcgggggaattttaaccaggcctttgctaccgcgggcgtcgcgttcctcctggagggctttcctgaatttactatcccggcgctcggtgt
ttttacattttactcttccatccaggagcgtgagaaaattatcaaaaccatcgaaaactgcctggagcagcgggtgaaacgctggaaaga
ttcttatcaatggatggtgtcaaactggttatctcgcatcacgacccaattcaaccatattaattaccagatgtatgatagtctgtcgtaccaa
gctgacgccattaaagccaaaattgatctggaatataaaaagtactctggtagcgataaggagaacatcaaaagccaggtggagaac
cttaagaatagtctggatgtgaaaatctctgaagctatgaataacattaacaaattcattcgtgaatgttcggtgacgtacctgttcaagaat
atgctgccaaaagttattgatgaactgaataaatttgatctgcgtaccaaaaccgaacttatcaacctcatcgactcccacaacattatcctt
gtgggcgaagtggatcgtctgaaggccaaagtaaacgagagctttgaaaatacgatgccgtttaatattttttcatataccaataactcctt
gctgaaagatatcatcaatgaatatttcaatctagaataatgaaagctt
SEQ ID33 CP-qGHRH29-D fusion
TWPVKDFNYSDPVNDNDILYLRIPQNKLITTPVKAFMITQNIWVIPERFSSDTNPSLSKPPRPTSKY
QSYYDPSYLSTDEQKDTFLKGIIKLFKRINERDIGKKLINYLVVGSPFMGDSSTPEDTFDFTRHTTN
IAVEKFENGSWKVTNIITPSVLIFGPLPNILDYTASLTLQGQQSNPSFEGFGTLSILKVAPEFLLTFS
DVTSNQSSAVLGKSIFCMDPVIALMHELTHSLHQLYGINIPSDKRIRPQVSEGFFSQDGPNVQFE
ELYTFGGLDVEIIPQIERSQLREKALGHYKDIAKRLNNINKTIPSSWISNIDKYKKIFSEKYNFDKDN
TGNFVVNIDKFNSLYSDLTNVMSEVVYSSQYNVKNRTHYFSRHYLPVFANILDDNIYTIRDGFNLT
NKGFNIENSGQNIERNPALQKLSSESVVDLFTKVCVDNNNNNNNNNNDDDDKHVDAIFTQSYRK
VLAQLSARKLLQDILNRAEAAAKEAAAKALQCIKVKNNRLPYVADKDSISQEIFENKIITDETNVQN
YSDKFSLDESILDGQVPINPEIVDPLLPNVNMEPLNLPGEEIVFYDDITKYVDYLNSYYYLESQKLS
NNVENITLTTSVEEALGYSNKIYTFLPSLAEKVNKGVQAGLFLNWANEVVEDFTTNIMKKDTLDKI
SDVSVIIPYIGPALNIGNSALRGNFNQAFATAGVAFLLEGFPEFTIPALGVFTFYSSIQEREKIIKTIE
NCLEQRVKRWKDSYQWMVSNWLSRITTQFNHINYQMYDSLSYQADAIKAKIDLEYKKYSGSDKE
NIKSQVENLKNSLDVKISEAMNNINKFIRECSVTYLFKNMLPKVIDELNKFDLRTKTELINLIDSHNII
LVGEVDRLKAKVNESFENTMPFNIFSYTNNSLLKDIINEYFN
SEQ ID34 CP-qGHRH-A fusion
EFVNKQFNYKDPVNGVDIAYIKIPNAGQMQPVKAFKIHNKIWVIPERDTFTNPEEGDLNPPPEAKQ
VPVSYYDSTYLSTDNEKDNYLKGVTKLFERIYSTDLGRMLLTSIVRGIPFWGGSTIDTELKVIDTNC
INVIQPDGSYRSEELNLVIIGPSADIIQFECKSFGHEVLNLTRNGYGSTQYIRFSPDFTFGFEESLE
VDTNPLLGAGKFATDPAVTLAHELIHAGHRLYGIAINPNRVFKVNTNAYYEMSGLEVSFEELRTFG
GHDAKFIDSLQENEFRLYYYNKFKDIASTLNKAKSIVGTTASLQYMKNVFKEKYLLSEDTSGKFSV
DKLKFDKLYKMLTEIYTEDNFVKFFKVLNRKTYLNFDKAVFKINIVPKVNYTIYDGFNLRNTNLAAN
FNGQNTEINNMNFTKLKNFTGLFEFYKLLCVDGIITSKTKSLIEGRHVDAIFTQSYRKVLAQLSARK
LLQDILNRQQGERNQEQGALAGGGGSGGGGSGGGGSALVLQCIKVNNWDLFFSPSEDNFTND
LNKGEEITSDTNIEAAEENISLDLIQQYYLTFNFDNEPENISIENLSSDIIGQLELMPNIERFPNGKKY
ELDKYTMFHYLRAQEFEHGKSRIALTNSVNEALLNPSRVYTFFSSDYVKKVNKATEAAMFLGWV
EQLVYDFTDETSEVSTTDKIADITIIIPYIGPALNIGNMLYKDDFVGALIFSGAVILLEFIPEIAIPVLGT
FALVSYIANKVLTVQTIDNALSKRNEKWDEVYKYIVTNWLAKVNTQIDLIRKKMKEALENQAEATK
AIINYQYNQYTEEEKNNINFNIDDLSSKLNESINKAMININKFLNQCSVSYLMNSMIPYGVKRLEDF
DASLKDALLKYIYDNRGTLIGQVDRLKDKVNNTLSTDIPFQLSKYVDNQRLLST
SEQ ID35 CP-qGHRH-C fusion
PITINNFNYSDPVDNKNILYLDTHLNTLANEPEKAFRITGNIWVIPDRFSRNSNPNLNKPPRVTSPK
SGYYDPNYLSTDSDKDTFLKEIIKLFKRINSREIGEELIYRLSTDIPFPGNNNTPINTFDFDVDFNSV
DVKTRQGNNWVKTGSINPSVIITGPRENIIDPETSTFKLTNNTFAAQEGFGALSIISISPRFMLTYSN
ATNDVGEGRFSKSEFCMDPILILMHELNHAMHNLYGIAIPNDQTISSVTSNIFYSQYNVKLEYAEIY
AFGGPTIDLIPKSARKYFEEKALDYYRSIAKRLNSITTANPSSFNKYIGEYKQKLIRKYRFVVESSG
EVTVNRNKFVELYNELTQIFTEFNYAKIYNVQNRKIYLSNVYTPVTANILDDNVYDIQNGFNIPKSN
LNVLFMGQNLSRNPALRKVNPENMLYLFTKFCVDAIDGRHVDAIFTQSYRKVLAQLSARKLLQDIL
NRQQGERNQEQGALAGGGGSGGGGSGGGGSALVLQCRELLVKNTDLPFIGDISDVKTDIFLRK
DINEETEVIYYPDNVSVDQVILSKNTSEHGQLDLLYPSIDSESEILPGENQVFYDNRTQNVDYLNS
YYYLESQKLSDNVEDFTFTRSIEEALDNSAKVYTYFPTLANKVNAGVQGGLFLMWANDVVEDFT
TNILRKDTLDKISDVSAIIPYIGPALNISNSVRRGNFTEAFAVTGVTILLEAFPEFTIPALGAFVIYSKV
QERNEIIKTIDNCLEQRIKRWKDSYEWMMGTWLSRIITQFNNISYQMYDSLNYQAGAIKAKIDLEY
KKYSGSDKENIKSQVENLKNSLDVKISEAMNNINKFIRECSVTYLFKNMLPKVIDELNEFDRNTKA
KLINLIDSHNIILVGEVDKLKAKVNNSFQNTIPFNIFSYTNNSLLKDIINEYFN
SEQ ID36 CP-qGHRH-D fusion
TWPVKDFNYSDPVNDNDILYLRIPQNKLITTPVKAFMITQNIWVIPERFSSDTNPSLSKPPRPTSKY
QSYYDPSYLSTDEQKDTFLKGIIKLFKRINERDIGKKLINYLVVGSPFMGDSSTPEDTFDFTRHTTN
IAVEKFENGSWKVTNIITPSVLIFGPLPNILDYTASLTLQGQQSNPSFEGFGTLSILKVAPEFLLTFS
DVTSNQSSAVLGKSIFCMDPVIALMHELTHSLHQLYGINIPSDKRIRPQVSEGFFSQDGPNVQFE
ELYTFGGLDVEIIPQIERSQLREKALGHYKDIAKRLNNINKTIPSSWISNIDKYKKIFSEKYNFDKDN
TGNFVVNIDKFNSLYSDLTNVMSEVVYSSQYNVKNRTHYFSRHYLPVFANILDDNIYTIRDGFNLT
NKGFNIENSGQNIERNPALQKLSSESVVDLFTKVCVDGIITSKTKSDDDDKHVDAIFTQSYRKVLA
QLSARKLLQDILNRQQGERNQEQGAALAGGGGSGGGGSGGGGSALALQCIKVKNNRLPYVAD
KDSISQEIFENKIITDETNVQNYSDKFSLDESILDGQVPINPEIVDPLLPNVNMEPLNLPGEEIVFYD
DITKYVDYLNSYYYLESQKLSNNVENITLTTSVEEALGYSNKIYTFLPSLAEKVNKGVQAGLFLNW
ANEVVEDFTTNIMKKDTLDKISDVSVIIPYIGPALNIGNSALRGNFNQAFATAGVAFLLEGFPEFTIP
ALGVFTFYSSIQEREKIIKTIENCLEQRVKRWKDSYQWMVSNWLSRITTQFNHINYQMYDSLSYQ
ADAIKAKIDLEYKKYSGSDKENIKSQVENLKNSLDVKISEAMNNINKFIRECSVTYLFKNMLPKVID
ELNKFDLRTKTELINLIDSHNIILVGEVDRLKAKVNESFENTMPFNIFSYTNNSLLKDIINEYFN
SEQ ID37 CP-qGHRH-D N10-PL5 fusion
TWPVKDFNYSDPVNDNDILYLRIPQNKLITTPVKAFMITQNIWVIPERFSSDTNPSLSKPPRPTSKY
QSYYDPSYLSTDEQKDTFLKGIIKLFKRINERDIGKKLINYLVVGSPFMGDSSTPEDTFDFTRHTTN
IAVEKFENGSWKVTNIITPSVLIFGPLPNILDYTASLTLQGQQSNPSFEGFGTLSILKVAPEFLLTFS
DVTSNQSSAVLGKSIFCMDPVIALMHELTHSLHQLYGINIPSDKRIRPQVSEGFFSQDGPNVQFE
ELYTFGGLDVEIIPQIERSQLREKALGHYKDIAKRLNNINKTIPSSWISNIDKYKKIFSEKYNFDKDN
TGNFVVNIDKFNSLYSDLTNVMSEVVYSSQYNVKNRTHYFSRHYLPVFANILDDNIYTIRDGFNLT
NKGFNIENSGQNIERNPALQKLSSESVVDLFTKVCVDNNNNNNNNNNDDDDKHVDAIFTQSYRK
VLAQLSARKLLQDILNRQQGERNQEQGAPAPAPLQCIKVKNNRLPYVADKDSISQEIFENKIITDE
TNVQNYSDKFSLDESILDGQVPINPEIVDPLLPNVNMEPLNLPGEEIVFYDDITKYVDYLNSYYYLE
SQKLSNNVENITLTTSVEEALGYSNKIYTFLPSLAEKVNKGVQAGLFLNWANEVVEDFTTNIMKKD
TLDKISDVSVIIPYIGPALNIGNSALRGNFNQAFATAGVAFLLEGFPEFTIPALGVFTFYSSIQEREKI
IKTIENCLEQRVKRWKDSYQWMVSNWLSRITTQFNHINYQMYDSLSYQADAIKAKIDLEYKKYSG
SDKENIKSQVENLKNSLDVKISEAMNNINKFIRECSVTYLFKNMLPKVIDELNKFDLRTKTELINLID
SHNIILVGEVDRLKAKVNESFENTMPFNIFSYTNNSLLKDIINEYFN
SEQ ID38 CP-qGHRH-D N10-HX12 fusion
TWPVKDFNYSDPVNDNDILYLRIPQNKLITTPVKAFMITQNIWVIPERFSSDTNPSLSKPPRPTSKYQ
SYYDPSYLSTDEQKDTFLKGIIKLFKRINERDIGKKLINYLVVGSPFMGDSSTPEDTFDFTRHTTNIAV
EKFENGSWKVTNIITPSVLIFGPLPNILDYTASLTLQGQQSNPSFEGFGTLSILKVAPEFLLTFSDVTS
NQSSAVLGKSIFCMDPVIALMHELTHSLHQLYGINIPSDKRIRPQVSEGFFSQDGPNVQFEELYTFG
GLDVEIIPQIERSQLREKALGHYKDIAKRLNNINKTIPSSWISNIDKYKKIFSEKYNFDKDNTGNFVVNI
DKFNSLYSDLTNVMSEVVYSSQYNVKNRTHYFSRHYLPVFANILDDNIYTIRDGFNLTNKGFNIENS
GQNIERNPALQKLSSESVVDLFTKVCVDNNNNNNNNNNDDDDKHVDAIFTQSYRKVLAQLSARKLL
QDILNRQQGERNQEQGAEAAAKEAAAKALQCIKVKNNRLPYVADKDSISQEIFENKIITDETNVQNY
SDKFSLDESILDGQVPINPEIVDPLLPNVNMEPLNLPGEEIVFYDDITKYVDYLNSYYYLESQKLSNN
VENITLTTSVEEALGYSNKIYTFLPSLAEKVNKGVQAGLFLNWANEVVEDFTTNIMKKDTLDKISDVS
VIIPYIGPALNIGNSALRGNFNQAFATAGVAFLLEGFPEFTIPALGVFTFYSSIQEREKIIKTIENCLEQR
VKRWKDSYQWMVSNWLSRITTQFNHINYQMYDSLSYQADAIKAKIDLEYKKYSGSDKENIKSQVEN
LKNSLDVKISEAMNNINKFIRECSVTYLFKNMLPKVIDELNKFDLRTKTELINLIDSHNIILVGEVDRLKA
KVNESFENTMPFNIFSYTNNSLLKDIINEYFN
SEQ ID39 CP-SST28-D fusion
TWPVKDFNYSDPVNDNDILYLRIPQNKLITTPVKAFMITQNIWVIPERFSSDTNPSLSKPPRPTSKY
QSYYDPSYLSTDEQKDTFLKGIIKLFKRINERDIGKKLINYLVVGSPFMGDSSTPEDTFDFTRHTTN
IAVEKFENGSWKVTNIITPSVLIFGPLPNILDYTASLTLQGQQSNPSFEGFGTLSILKVAPEFLLTFS
DVTSNQSSAVLGKSIFCMDPVIALMHELTHSLHQLYGINIPSDKRIRPQVSEGFFSQDGPNVQFE
ELYTFGGLDVEIIPQIERSQLREKALGHYKDIAKRLNNINKTIPSSWISNIDKYKKIFSEKYNFDKDN
TGNFVVNIDKFNSLYSDLTNVMSEVVYSSQYNVKNRTHYFSRHYLPVFANILDDNIYTIRDGFNLT
NKGFNIENSGQNIERNPALQKLSSESVVDLFTKVCVDGIITSKTKSDDDDKSANSNPAMAPRERK
AGCKNFFWKTFTSCALAGGGGSGGGGSGGGGSALALQCIKVKNNRLPYVADKDSISQEIFENKII
TDETNVQNYSDKFSLDESILDGQVPINPEIVDPLLPNVNMEPLNLPGEEIVFYDDITKYVDYLNSYY
YLESQKLSNNVENITLTTSVEEALGYSNKIYTFLPSLAEKVNKGVQAGLFLNWANEWEDFTTNIM
KKDTLDKISDVSVIIPYIGPALNIGNSALRGNFNQAFATAGVAFLLEGFPEFTIPALGVFTFYSSIQE
REKIIKTIENCLEQRVKRWKDSYQWMVSNWLSRITTQFNHINYQMYDSLSYQADAIKAKIDLEYKK
YSGSDKENIKSQVENLKNSLDVKISEAMNNINKFIRECSVTYLFKNMLPKVIDELNKFDLRTKTELI
NLIDSHNIILVGEVDRLKAKVNESFENTMPFNIFSYTNNSLLKDIINEYFN
SEQ ID40 CP-SST14-D fusion
TWPVKDFNYSDPVNDNDILYLRIPQNKLITTPVKAFMITQNIWVIPERFSSDTNPSLSKPPRPTSKY
QSYYDPSYLSTDEQKDTFLKGIIKLFKRINERDIGKKLINYLVVGSPFMGDSSTPEDTFDFTRHTTN
IAVEKFENGSWKVTNIITPSVLIFGPLPNILDYTASLTLQGQQSNPSFEGFGTLSILKVAPEFLLTFS
DVTSNQSSAVLGKSIFCMDPVIALMHELTHSLHQLYGINIPSDKRIRPQVSEGFFSQDGPNVQFE
ELYTFGGLDVEIIPQIERSQLREKALGHYKDIAKRLNNINKTIPSSWISNIDKYKKIFSEKYNFDKDN
TGNFVVNIDKFNSLYSDLTNVMSEVVYSSQYNVKNRTHYFSRHYLPVFANILDDNIYTIRDGFNLT
NKGFNIENSGQNIERNPALQKLSSESVVDLFTKVCVDGIITSKTKSDDDDKAGCKNFFWKTFTSC
ALAGGGGSGGGGSGGGGSALALQCIKVKNNRLPYVADKDSISQEIFENKIITDETNVQNYSDKFS
LDESILDGQVPINPEIVDPLLPNVNMEPLNLPGEEIVFYDDITKYVDYLNSYYYLESQKLSNNVENI
TLTTSVEEALGYSNKIYTFLPSLAEKVNKGVQAGLFLNWANEVVEDFTTNIMKKDTLDKISDVSVII
PYIGPALNIGNSALRGNFNQAFATAGVAFLLEGFPEFTIPALGVFTFYSSIQEREKIIKTIENCLEQR
VKRWKDSYQWMVSNWLSRITTQFNHINYQMYDSLSYQADAIKAKIDLEYKKYSGSDKENIKSQV
ENLKNSLDVKISEAMNNINKFIRECSVTYLFKNMLPKVIDELNKFDLRTKTELINLIDSHNIILVGEVD
RLKAKVNESFENTMPFNIFSYTNNSLLKDIINEYFN
SEQ ID41 IgA-CP-SST14-H_{N}tet fusion
ESNQPEKNGTATKPENSGNTTSENGQTEPEKKLELRNVSDIELYSQTNGTYRQHVSLDGIPENT
DTYFVKVKSSAFKDVYIPVASITEEKRNGQSVYKITAKAEKLQQELENKYVDNFTFYLDKKAKEEN
TNFTSFSNLVKAINQNPSGTYHLAASLNANEVELGPDERSYIKDTFTGRLIGEKDGKNYAIYNLKK
PLFENLSGATVEKLSLKNVAISGKNDIGSLANEATNGTKIKQVHVDGCVDGIITSKTKSDDDDKAG
CKNFFWKTFTSCALAGGGGSGGGGSGGGGSALALQCIKIKNEDLTFIAEKNSFSEEPFQDEIVSY
NTKNKPLNFNYSLDKIIVDYNLQSKITLPNDRTTPVTKGIPYAPEYKSNAASTIEIHNIDDNTIYQYLY
AQKSPTTLQRITMTNSVDDALINSTKIYSYFPSVISKVNQGAQGILFLQWVRDIIDDFTNESSQKTTI
DKISDVSTIVPYIGPALNIVKQGYEGNFIGALETTGVVLLLEYIPEITLPVIAALSIAESSTQKEKIIKTI
DNFLEKRYEKWIEVYKLVKAKWLGTVNTQFQKRSYQMYRSLEYQVDAIKKIIDYEYKIYSGPDKE
QIADEINNLKNKLEEKANKAMININIFMRESSRSFLVNQMINEAKKQLLEFDTQSKNILMQYIKANS
KFIGITELKKLESKINKVFSTPIPFSYSKNLDCWVDNEEDIDV
SEQ ID42 CP-UTS-A fusion
EFVNKQFNYKDPVNGVDIAYIKIPNAGQMQPVKAFKIHNKIWVIPERDTFTNPEEGDLNPPPEAKQ
VPVSYYDSTYLSTDNEKDNYLKGVTKLFERIYSTDLGRMLLTSIVRGIPFWGGSTIDTELKVIDTNC
INVIQPDGSYRSEELNLVIIGPSADIIQFECKSFGHEVLNLTRNGYGSTQYIRFSPDFTFGFEESLE
VDTNPLLGAGKFATDPAVTLAHELIHAGHRLYGIAINPNRVFKVNTNAYYEMSGLEVSFEELRTFG
GHDAKFIDSLQENEFRLYYYNKFKDIASTLNKAKSIVGTTASLQYMKNVFKEKYLLSEDTSGKFSV
DKLKFDKLYKMLTEIYTEDNFVKFFKVLNRKTYLNFDKAVFKINIVPKVNYTIYDGFNLRNTNLAAN
FNGQNTEINNMNFTKLKNFTGLFEFYKLLCVDGGGGSADDDDKNDDPPISIDLTFHLLRNMIEMA
RIENEREQAGLNRKYLDEVALAGGGGSGGGGSGGGGSALVLQCIKVNNWDLFFSPSEDNFTND
LNKGEEITSDTNlEAAEENISLDLIQQYYLTFNFDNEPENISIENLSSDIIGQLELMPNIERFPNGKKY
ELDKYTMFHYLRAQEFEHGKSRIALTNSVNEALLNPSRVYTFFSSDYVKKVNKATEAAMFLGWV
EQLVYDFTDETSEVSTTDKIADITIIIPYIGPALNIGNMLYKDDFVGALIFSGAVILLEFIPEIAIPVLGT
FALVSYIANKVLTVQTIDNALSKRNEKWDEVYKYIVTNWLAKVNTQIDLIRKKMKEALENQAEATK
AIINYQYNQYTEEEKNNINFNIDDLSSKLNESINKAMININKFLNQCSVSYLMNSMIPYGVKRLEDF
DASLKDALLKYIYDNRGTLIGQVDRLKDKVNNTLSTDIPFQLSKYVDNQRLLST
SEQ ID43 CP-hTGF-B GS10-NS fusion
PVTINNFNYNDPIDNNNIIMMEPPFARGTGRYYKAFKITDRIWIIPERYTFGYKPEDFNKSSGIFNR
DVCEYYDPDYLNTNDKKNIFLQTMIKLFNRIKSKPLGEKLLEMIINGIPYLGDRRVPLEEFNTNIASV
TVNKLISNPGEVERKKGIFANLIIFGPGPVLNENETIDIGIQNHFASREGFGGIMQMKFCPEYVSVF
NNVQENKGASIFNRRGYFSDPALILMHELIHVLHGLYGIKVDDLPIVPNEKKFFMQSTDAIQAEELY
TFGGQDPSIITPSTDKSIYDKVLQNFRGIVDRLNKVLVCISDPNININIYKNKFKDKYKFVEDSEGKY
SIDVESFDKLYKSLMFGFTETNIAENYKIKTRASYFSDSLPPVKIKNLLDNEIYTIEEGFNISDKDME
KEYRGQNKAINKQAYEEISKEHLAVYKIQMCVDGGGGSGGGGSADDDDKVVSHFNDCPDSHTQ
FCFHGTCRFLVQEDKPACVCHSGYVGARCEHADLLAALAKRLVLQCIDVDNEDLFFIADKNSFSD
DLSKNERIEYNTQSNYIENDFPINELILDTDLISKIELPSENTESLTDFNVDVPVYEKQPAIKKIFTDE
NTIFQYLYSQTFPLDIRDISLTSSFDDALLFSNKVYSFFSMDYIKTANKVVEAGLFAGWVKQIVNDF
VIEANKSNTMDAIADISLIVPYIGLALNVGNETAKGNFENAFEIAGASILLEFIPELLIPVVGAFLLESY
IDNKNKIIKTIDNALTKRNEKWSDMYGLIVAQWLSTVNTQFYTIKEGMYKALNYQAQALEEIIKYRY
NIYSEKEKSNINIDFNDINSKLNEGINQAIDNINNFINGCSVSYLMKKMIPLAVEKLLDFDNTLKKNLL
NYIDENKLYLIGSAEYEKSKVNKYLKTIMPFDLSIYTNDTILIEMFNKYNS
SEQ ID44 CP-hTGF-B GS10-GS20 fusion
PVTINNFNYNDPIDNNNIIMMEPPFARGTGRYYKAFKITDRIWIIPERYTFGYKPEDFNKSSGIFNR
DVCEYYDPDYLNTNDKKNIFLQTMIKLFNRIKSKPLGEKLLEMIINGIPYLGDRRVPLEEFNTNIASV
TVNKLISNPGEVERKKGIFANLIIFGPGPVLNENETIDIGIQNHFASREGFGGIMQMKFCPEYVSVF
NNVQENKGASIFNRRGYFSDPALILMHELIHVLHGLYGIKVDDLPIVPNEKKFFMQSTDAIQAEELY
TFGGQDPSIITPSTDKSIYDKVLQNFRGIVDRLNKVLVCISDPNININIYKNKFKDKYKFVEDSEGKY
SIDVESFDKLYKSLMFGFTETNIAENYKIKTRASYFSDSLPPVKIKNLLDNEIYTIEEGFNISDKDME
KEYRGQNKAINKQAYEEISKEHLAVYKIQMCVDGGGGSGGGGSADDDDKVVSHFNDCPDSHTQ
FCFHGTCRFLVQEDKPACVCHSGYVGARCEHADLLAALAGGGGSGGGGSGGGGSALVLQCID
VDNEDLFFIADKNSFSDDLSKNERIEYNTQSNYIENDFPINELILDTDLISKIELPSENTESLTDFNV
DVPVYEKQPAIKKIFTDENTIFQYLYSQTFPLDIRDISLTSSFDDALLFSNKVYSFFSMDYIKTANKV
VEAGLFAGWVKQIVNDFVIEANKSNTMDAIADISLIVPYIGLALNVGNETAKGNFENAFEIAGASILL
EFIPELLIPVVGAFLLESYIDNKNKIIKTIDNALTKRNEKWSDMYGLIVAQWLSTVNTQFYTIKEGMY
KALNYQAQALEEIIKYRYNIYSEKEKSNINIDFNDINSKLNEGINQAIDNINNFINGCSVSYLMKKMIP
LAVEKLLDFDNTLKKNLLNYIDENKLYLIGSAEYEKSKVNKYLKTIMPFDLSIYTNDTILIEMFNKYNS
SEQ ID45 Protein sequence of LH_{N}/A
EFVNKQFNYKDPVNGVDIAYIKIPNAGQMQPVKAFKIHNKIWVIPERDTFTNPEEGDLNPPPEAKQ
VPVSYYDSTYLSTDNEKDNYLKGVTKLFERIYSTDLGRMLLTSIVRGIPFWGGSTIDTELKVIDTNC
INVIQPDGSYRSEELNLVIIGPSADIIQFECKSFGHEVLNLTRNGYGSTQYIRFSPDFTFGFEESLE
VDTNPLLGAGKFATDPAVTLAHELIHAGHRLYGIAINPNRVFKVNTNAYYEMSGLEVSFEELRTFG
GHDAKFIDSLQENEFRLYYYNKFKDIASTLNKAKSIVGTTASLQYMKNVFKEKYLLSEDTSGKFSV
DKLKFDKLYKMLTEIYTEDNFVKFFKVLNRKTYLNFDKAVFKINIVPKVNYTIYDGFNLRNTNLAAN
FNGQNTEINNMNFTKLKNFTGLFEFYKLLCVDGIITSKTKSDDDDKNKALNLQCIKVNNWDLFFSP
SEDNFTNDLNKGEEITSDTNIEAAEENISLDLIQQYYLTFNFDNEPENISIENLSSDIIGQLELMPNIE
RFPNGKKYELDKYTMFHYLRAQEFEHGKSRIALTNSVNEALLNPSRVYTFFSSDYVKKVNKATEA
AMFLGWVEQLVYDFTDETSEVSTTDKIADITIIIPYIGPALNIGNMLYKDDFVGALIFSGAVILLEFIPE
IAIPVLGTFALVSYIANKVLTVQTIDNALSKRNEKWDEVYKYIVTNWLAKVNTQIDLIRKKMKEALEN
QAEATKAIINYQYNQYTEEEKNNINFNIDDLSSKLNESINKAMININKFLNQCSVSYLMNSMIPYGV
KRLEDFDASLKDALLKYIYDNRGTLIGQVDRLKDKVNNTLSTDIPFQLSKYVDNQRLLST
SEQ ID46 Protein sequence of LH_{N}/B
PVTINNFNYNDPIDNNNIIMMEPPFARGTGRYYKAFKITDRIWIIPERYTFGYKPEDFNKSSGIFNR
DVCEYYDPDYLNTNDKKNIFLQTMIKLFNRIKSKPLGEKLLEMIINGIPYLGDRRVPLEEFNTNIASV
TVNKLISNPGEVERKKGIFANLIIFGPGPVLNENETIDIGIQNHFASREGFGGIMQMKFCPEYVSVF
NNVQENKGASIFNRRGYFSDPALILMHELIHVLHGLYGIKVDDLPIVPNEKKFFMQSTDAIQAEELY
TFGGQDPSIITPSTDKSIYDKVLQNFRGIVDRLNKVLVCISDPNININIYKNKFKDKYKFVEDSEGKY
SIDVESFDKLYKSLMFGFTETNIAENYKIKTRASYFSDSLPPVKIKNLLDNEIYTIEEGFNISDKDME
KEYRGQNKAINKQAYEEISKEHLAVYKIQMCVDEEKLYDDDDKDRWGSSLQCIDVDNEDLFFIAD
KNSFSDDLSKNERIEYNTQSNYIENDFPINELILDTDLISKIELPSENTESLTDFNVDVPVYEKQPAI
KKIFTDENTIFQYLYSQTFPLDIRDISLTSSFDDALLFSNKVYSFFSMDYIKTANKVVEAGLFAGWV
KQIVNDFVIEANKSNTMDAIADISLIVPYIGLALNVGNETAKGNFENAFEIAGASILLEFIPELLIPVVG
AFLLESYIDNKNKIIKTIDNALTKRNEKWSDMYGLIVAQWLSTVNTQFYTIKEGMYKALNYQAQAL
EEIIKYRYNIYSEKEKSNINIDFNDINSKLNEGINQAIDNINNFINGCSVSYLMKKMIPLAVEKLLDFD
NTLKKNLLNYIDENKLYLIGSAEYEKSKVNKYLKTIMPFDLSIYTNDTILIEMFNKYNS
SEQ ID47 Protein sequence of LH_{N}/C
PITINNFNYSDPVDNKNILYLDTHLNTLANEPEKAFRITGNIWVIPDRFSRNSNPNLNKPPRVTSPK
SGYYDPNYLSTDSDKDTFLKEIIKLFKRINSREIGEELIYRLSTDIPFPGNNNTPINTFDFDVDFNSV
DVKTRQGNNWVKTGSINPSVIITGPRENIIDPETSTFKLTNNTFAAQEGFGALSIISISPRFMLTYSN
ATNDVGEGRFSKSEFCMDPILILMHELNHAMHNLYGIAIPNDQTISSVTSNIFYSQYNVKLEYAEIY
AFGGPTIDLIPKSARKYFEEKALDYYRSIAKRLNSITTANPSSFNKYIGEYKQKLIRKYRFVVESSG
EVTVNRNKFVELYNELTQIFTEFNYAKIYNVQNRKIYLSNVYTPVTANILDDNVYDIQNGFNIPKSN
LNVLFMGQNLSRNPALRKVNPENMLYLFTKFCVDAIDGRSLYNKTLQCRELLVKNTDLPFIGDISD
VKTDIFLRKDINEETEVIYYPDNVSVDQVILSKNTSEHGQLDLLYPSIDSESEILPGENQVFYDNRT
QNVDYLNSYYYLESQKLSDNVEDFTFTRSIEEALDNSAKVYTYFPTLANKVNAGVQGGLFLMWA
NDVVEDFTTNILRKDTLDKISDVSAIIPYIGPALNISNSVRRGNFTEAFAVTGVTILLEAFPEFTIPAL
GAFVIYSKVQERNEIIKTIDNCLEQRIKRWKDSYEWMMGTWLSRIITQFNNISYQMYDSLNYQAG
AIKAKIDLEYKKYSGSDKENIKSQVENLKNSLDVKISEAMNNINKFIRECSVTYLFKNMLPKVIDELN
EFDRNTKAKLINLIDSHNIILVGEVDKLKAKVNNSFQNTIPFNIFSYTNNSLLKDIINEYFN
SEQ ID48 Protein sequence of LH_{N}/D
TWPVKDFNYSDPVNDNDILYLRIPQNKLITTPVKAFMITQNIWVIPERFSSDTNPSLSKPPRPTSKY
QSYYDPSYLSTDEQKDTFLKGIIKLFKRINERDIGKKLINYLVVGSPFMGDSSTPEDTFDFTRHTTN
IAVEKFENGSWKVTNIITPSVLIFGPLPNILDYTASLTLQGQQSNPSFEGFGTLSILKVAPEFLLTFS
DVTSNQSSAVLGKSIFCMDPVIALMHELTHSLHQLYGINIPSDKRIRPQVSEGFFSQDGPNVQFE
ELYTFGGLDVEIIPQIERSQLREKALGHYKDIAKRLNNINKTIPSSWISNIDKYKKIFSEKYNFDKDN
TGNFVVNIDKFNSLYSDLTNVMSEVVYSSQYNVKNRTHYFSRHYLPVFANILDDNIYTIRDGFNLT
NKGFNIENSGQNIERNPALQKLSSESVVDLFTKVCVDKSEEKLYDDDDKDRWGSSLQCIKVKNN
RLPYVADKDSISQEIFENKIITDETNVQNYSDKFSLDESILDGQVPINPEIVDPLLPNVNMEPLNLPG
EEIVFYDDITKYVDYLNSYYYLESQKLSNNVENITLTTSVEEALGYSNKIYTFLPSLAEKVNKGVQA
GLFLNWANEVVEDFTTNIMKKDTLDKISDVSVIIPYIGPALNIGNSALRGNFNQAFATAGVAFLLEG
FPEFTIPALGVFTFYSSIQEREKIIKTIENCLEQRVKRWKDSYQWMVSNWLSRITTQFNHINYQMY
DSLSYQADAIKAKIDLEYKKYSGSDKENIKSQVENLKNSLDVKISEAMNNINKFIRECSVTYLFKNM
LPKVIDELNKFDLRTKTELINLIDSHNIILVGEVDRLKAKVNESFENTMPFNIFSYTNNSLLKDIINEY
FN
SEQ ID49 Protein sequence of IgA-H_{N}tet
ESNQPEKNGTATKPENSGNTTSENGQTEPEKKLELRNVSDIELYSQTNGTYRQHVSLDGIPENT
DTYFVKVKSSAFKDVYIPVASITEEKRNGQSVYKITAKAEKLQQELENKYVDNFTFYLDKKAKEEN
TNFTSFSNLVKAINQNPSGTYHLAASLNANEVELGPDERSYIKDTFTGRLIGEKDGKNYAIYNLKK
PLFENLSGATVEKLSLKNVAISGKNDIGSLANEATNGTKIKQVHVDGCVDGIITSKTKSDDDDKNK
ALNLQCIKIKNEDLTFIAEKNSFSEEPFQDEIVSYNTKNKPLNFNYSLDKIIVDYNLQSKITLPNDRT
TPVTKGIPYAPEYKSNAASTIEIHNIDDNTIYQYLYAQKSPTTLQRITMTNSVDDALINSTKIYSYFP
SVISKVNQGAQGILFLQWVRDIIDDFTNESSQKTTIDKISDVSTIVPYIGPALNIVKQGYEGNFIGAL
ETTGVVLLLEYIPEITLPVIAALSIAESSTQKEKIIKTIDNFLEKRYEKWIEVYKLVKAKWLGTVNTQF
QKRSYQMYRSLEYQVDAIKKIIDYEYKIYSGPDKEQIADEINNLKNKLEEKANKAMININIFMRESS
RSFLVNQMINEAKKQLLEFDTQSKNILMQYIKANSKFIGITELKKLESKINKVFSTPIPFSYSKNLDC
WVDNEEDIDV
SEQ ID50 Synthesised Octreotide peptide
Cys-Dphe-Cys-Phe-Dtrp-Lys-Thr-Cys-Thr-ol
SEQ ID51 Synthesised GHRH agonist peptide
HIS-ALA-ASP-ALA-ILE-PHE-THR-ASN-SER-TYR-ARG-LYS-VAL-LEU-GLY-GLN-LEU-SER-
ALA-ARG-LYS-LEU-LEU-GLN-ASP-ILE-NLE-SER-ARG-CYS
SEQ ID52 Synthesised GHRH antagonist peptide
PhAc-Tyr-D-Arg-Asp-Ala-IIe-Phe(4-Cl)-Thr-Ala-Har-Tyr(Me)-His-Lys-Val-Leu-
Abu-Gln-Leu-Ser-Ala-His-Lys-Leu-Leu-Gln-Asp-Ile-Nle-D-Arg-Har-CYS
SEQ ID53 Protein sequence of CP-MCH-D fusion
TWPVKDFNYSDPVNDNDILYLRIPQNKLITTPVKAFMITQNIWVIPERFSSDTNPSLSKPPRPTSKYQ
SYYDPSYLSTDEQKDTFLKGIIKLFKRINERDIGKKLINYLVVGSPFMGDSSTPEDTFDFTRHTTNIAV
EKFENGSWKVTNIITPSVLIFGPLPNILDYTASLTLQGQQSNPSFEGFGTLSILKVAPEFLLTFSDVTS
NQSSAVLGKSIFCMDPVIALMHELTHSLHQLYGINIPSDKRIRPQVSEGFFSQDGPNVQFEELYTFG
GLDVEIIPQIERSQLREKALGHYKDIAKRLNNINKTIPSSWISNIDKYKKIFSEKYNFDKDNTGNFVVNI
DKFNSLYSDLTNVMSEVVYSSQYNVKNRTHYFSRHYLPVFANILDDNIYTIRDGFNLTNKGFNIENS
GQNIERNPALQKLSSESVVDLFTKVCVDGIITSKTKSDDDDKDFDMLRCMLGRVYRPCWQVALAKR
LVLQCIKVKNNRLPYVADKDSISQEIFENKIITDETNVQNYSDKFSLDESILDGQVPINPEIVDPLLPNV
NMEPLNLPGEEIVFYDDITKYVDYLNSYYYLESQKLSNNVENITLTTSVEEALGYSNKIYTFLPSLAEK
VNKGVQAGLFLNWANEVVEDFTTNIMKKDTLDKISDVSVIIPYIGPALNIGNSALRGNFNQAFATAGV
AFLLEGFPEFTIPALGVFTFYSSIQEREKIIKTIENCLEQRVKRWKDSYQWMVSNWLSRITTQFNHIN
YQMYDSLSYQADAIKAKIDLEYKKYSGSDKENIKSQVENLKNSLDVKISEAMNNINKFIRECSVTYLF
KNMLPKVIDELNKFDLRTKTELINLIDSHNIILVGEVDRLKAKVNESFENTMPFNIFSYTNNSLLKDIINE
YFN
SEQ ID54 Protein sequence of KISS-D fusion
TWPVKDFNYSDPVNDNDILYLRIPQNKLITTPVKAFMITQNIWVIPERFSSDTNPSLSKPPRPTSKYQ
SYYDPSYLSTDEQKDTFLKGIIKLFKRINERDIGKKLINYLVVGSPFMGDSSTPEDTFDFTRHTTNIAV
EKFENGSWKVTNIITPSVLIFGPLPNILDYTASLTLQGQQSNPSFEGFGTLSILKVAPEFLLTFSDVTS
NQSSAVLGKSIFCMDPVIALMHELTHSLHQLYGINIPSDKRIRPQVSEGFFSQDGPNVQFEELYTFG
GLDVEIIPQIERSQLREKALGHYKDIAKRLNNINKTIPSSWISNIDKYKKIFSEKYNFDKDNTGNFVVNI
DKFNSLYSDLTNVMSEVVYSSQYNVKNRTHYFSRHYLPVFANILDDNIYTIRDGFNLTNKGFNIENS
GQNIERNPALQKLSSESVVDLFTKVCVDKSEEKLYDDDDKDRWGSSLQCIKVKNNRLPYVADKDSI
SQEIFENKIITDETNVQNYSDKFSLDESILDGQVPINPEIVDPLLPNVNMEPLNLPGEEIVFYDDITKYV
DYLNSYYYLESQKLSNNVENITLTTSVEEALGYSNKIYTFLPSLAEKVNKGVQAGLFLNWANEVVED
FTTNIMKKDTLDKISDVSVIIPYIGPALNIGNSALRGNFNQAFATAGVAFLLEGFPEFTIPALGVFTFYS
SIQEREKIIKTIENCLEQRVKRWKDSYQWMVSNWLSRITTQFNHINYQMYDSLSYQADAIKAKIDLEY
KKYSGSDKENIKSQVENLKNSLDVKISEAMNNINKFIRECSVTYLFKNMLPKVIDELNKFDLRTKTELI
NLIDSHNIILVGEVDRLKAKVNESFENTMPFNIFSYTNNSLLKDIINEYFNLEGGGGSGGGGSGGGG
SALVYNWNSFGLRFG
SEQ ID55 Protein sequence of PrRP-A fusion
EFVNKQFNYKDPVNGVDIAYIKIPNAGQMQPVKAFKIHNKIWVIPERDTFTNPEEGDLNPPPEAKQV
PVSYYDSTYLSTDNEKDNYLKGVTKLFERIYSTDLGRMLLTSIVRGIPFWGGSTIDTELKVIDTNCINV
IQPDGSYRSEELNLVIIGPSADIIQFECKSFGHEVLNLTRNGYGSTQYIRFSPDFTFGFEESLEVDTN
PLLGAGKFATDPAVTLAHELIHAGHRLYGIAINPNRVFKVNTNAYYEMSGLEVSFEELRTFGGHDAK
FIDSLQENEFRLYYYNKFKDIASTLNKAKSIVGTTASLQYMKNVFKEKYLLSEDTSGKFSVDKLKFDK
LYKMLTEIYTEDNFVKFFKVLNRKTYLNFDKAVFKINIVPKVNYTIYDGFNLRNTNLAANFNGQNTEIN
NMNFTKLKNFTGLFEFYKLLCVDGIITSKTKSDDDDKNKALNLQCIKVNNWDLFFSPSEDNFTNDLN
KGEEITSDTNIEAAEENISLDLIQQYYLTFNFDNEPENISIENLSSDIIGQLELMPNIERFPNGKKYELD
KYTMFHYLRAQEFEHGKSRIALTNSVNEALLNPSRVYTFFSSDYVKKVNKATEAAMFLGWVEQLVY
DFTDETSEVSTTDKIADITIIIPYIGPALNIGNMLYKDDFVGALIFSGAVILLEFIPEIAIPVLGTFALVSYIA
NKVLTVQTIDNALSKRNEKWDEVYKYIVTNWLAKVNTQIDLIRKKMKEALENQAEATKAIINYQYNQY
TEEEKNNINFNIDDLSSKLNESINKAMININKFLNQCSVSYLMNSMIPYGVKRLEDFDASLKDALLKYI
YDNRGTLIGQVDRLKDKVNNTLSTDIPFQLSKYVDNQRLLSTLEGGGGSGGGGSGGGGSALVTPD
INPAWYASRGIRPVGRFG
SEQ ID56 Protein sequence of CP-CRH-C fusion
PITINNFNYSDPVDNKNILYLDTHLNTLANEPEKAFRITGNIWVIPDRFSRNSNPNLNKPPRVTSPK
SGYYDPNYLSTDSDKDTFLKEIIKLFKRINSREIGEELIYRLSTDIPFPGNNNTPINTFDFDVDFNSV
DVKTRQGNNWVKTGSINPSVIITGPRENIIDPETSTFKLTNNTFAAQEGFGALSIISISPRFMLTYSN
ATNDVGEGRFSKSEFCMDPILILMHELNHAMHNLYGIAIPNDQTISSVTSNIFYSQYNVKLEYAEIY
AFGGPTIDLIPKSARKYFEEKALDYYRSIAKRLNSITTANPSSFNKYIGEYKQKLIRKYRFVVESSG
EVTVNRNKFVELYNELTQIFTEFNYAKIYNVQNRKIYLSNVYTPVTANILDDNVYDIQNGFNIPKSN
LNVLFMGQNLSRNPALRKVNPENMLYLFTKFCVDGGGGSADDDDKSEEPPISLDLTFHLLREVL
EMARAEQLAQQAHSNRKLMEIIALAGGGGSGGGGSGGGGSALVLQCRELLVKNTDLPFIGDISD
VKTDIFLRKDINEETEVIYYPDNVSVDQVILSKNTSEHGQLDLLYPSIDSESEILPGENQVFYDNRT
QNVDYLNSYYYLESQKLSDNVEDFTFTRSIEEALDNSAKVYTYFPTLANKVNAGVQGGLFLMWA
NDVVEDFTTNILRKDTLDKISDVSAIIPYIGPALNISNSVRRGNFTEAFAVTGVTILLEAFPEFTIPAL
GAFVIYSKVQERNEIIKTIDNCLEQRIKRWKDSYEWMMGTWLSRIITQFNNISYQMYDSLNYQAG
AIKAKIDLEYKKYSGSDKENIKSQVENLKNSLDVKISEAMNNINKFIRECSVTYLFKNMLPKVIDELN
EFDRNTKAKLINLIDSHNIILVGEVDKLKAKVNNSFQNTIPFNIFSYTNNSLLKDIINEYFN
SEQ ID57 Protein sequence of CP-HS_GHRH_1-27-LHD fusion
TWPVKDFNYSDPVNDNDILYLRIPQNKLITTPVKAFMITQNIWVIPERFSSDTNPSLSKPPRPTSKYQ
SYYDPSYLSTDEQKDTFLKGIIKLFKRINERDIGKKLINYLVVGSPFMGDSSTPEDTFDFTRHTTNIAV
EKFENGSWKVTNIITPSVLIFGPLPNILDYTASLTLQGQQSNPSFEGFGTLSILKVAPEFLLTFSDVTS
NQSSAVLGKSIFCMDPVIALMHELTHSLHQLYGINIPSDKRIRPQVSEGFFSQDGPNVQFEELYTFG
GLDVEIIPQIERSQLREKALGHYKDIAKRLNNINKTIPSSWISNIDKYKKIFSEKYNFDKDNTGNFVVNI
DKFNSLYSDLTNVMSEVVYSSQYNVKNRTHYFSRHYLPVFANILDDNIYTIRDGFNLTNKGFNIENS
GQNIERNPALQKLSSESVVDLFTKVCVDGIITSKTKSDDDDKYADAIFTNSYRKVLGQLSARKLLQDI
MALAGGGGSGGGGSGGGGSALALQCIKVKNNRLPYVADKDSISQEIFENKIITDETNVQNYSDKFS
LDESILDGQVPINPEIVDPLLPNVNMEPLNLPGEEIVFYDDITKYVDYLNSYYYLESQKLSNNVENITL
TTSVEEALGYSNKIYTFLPSLAEKVNKGVQAGLFLNWANEVVEDFTTNIMKKDTLDKISDVSVIIPYIG
PALNIGNSALRGNFNQAFATAGVAFLLEGFPEFTIPALGVFTFYSSIQEREKIIKTIENCLEQRVKRWK
DSYQWMVSNWLSRITTQFNHINYQMYDSLSYQADAIKAKIDLEYKKYSGSDKENIKSQVENLKNSL
DVKISEAMNNINKFIRECSVTYLFKNMLPKVIDELNKFDLRTKTELINLIDSHNIILVGEVDRLKAKVNE
SFENTMPFNIFSYTNNSLLKDIINEYFN
SEQ ID58 Protein sequence of the CP-HS_GHRH_1-28-LHD fusion
TWPVKDFNYSDPVNDNDILYLRIPQNKLITTPVKAFMITQNIWVIPERFSSDTNPSLSKPPRPTSKYQ
SYYDPSYLSTDEQKDTFLKGIIKLFKRINERDIGKKLINYLVVGSPFMGDSSTPEDTFDFTRHTTNIAV
EKFENGSWKVTNIITPSVLIFGPLPNILDYTASLTLQGQQSNPSFEGFGTLSILKVAPEFLLTFSDVTS
NQSSAVLGKSIFCMDPVIALMHELTHSLHQLYGINIPSDKRIRPQVSEGFFSQDGPNVQFEELYTFG
GLDVEIIPQIERSQLREKALGHYKDIAKRLNNINKTIPSSWISNIDKYKKIFSEKYNFDKDNTGNFVVNI
DKFNSLYSDLTNVMSEVVYSSQYNVKNRTHYFSRHYLPVFANILDDNIYTIRDGFNLTNKGFNIENS
GQNIERNPALQKLSSESVVDLFTKVCVDGIITSKTKSDDDDKYADAIFTNSYRKVLGQLSARKLLQDI
MSALAGGGGSGGGGSGGGGSALALQCIKVKNNRLPYVADKDSISQEIFENKIITDETNVQNYSDKF
SLDESILDGQVPINPEIVDPLLPNVNMEPLNLPGEEIVFYDDITKYVDYLNSYYYLESQKLSNNVENIT
LTTSVEEALGYSNKIYTFLPSLAEKVNKGVQAGLFLNWANEVVEDFTTNIMKKDTLDKISDVSVIIPYI
GPALNIGNSALRGNFNQAFATAGVAFLLEGFPEFTIPALGVFTFYSSIQEREKIIKTIENCLEQRVKRW
KDSYQWMVSNWLSRITTQFNHINYQMYDSLSYQADAIKAKIDLEYKKYSGSDKENIKSQVENLKNS
LDVKISEAMNNINKFIRECSVTYLFKNMLPKVIDELNKFDLRTKTELINLIDSHNIILVGEVDRLKAKVN
ESFENTMPFNIFSYTNNSLLKDIINEYFN
SEQ ID59 Protein sequence of the CP-HS_GHRH_1-29-LHD fusion
TWPVKDFNYSDPVNDNDILYLRIPQNKLITTPVKAFMITQNIWVIPERFSSDTNPSLSKPPRPTSKYQ
SYYDPSYLSTDEQKDTFLKGIIKLFKRINERDIGKKLINYLVVGSPFMGDSSTPEDTFDFTRHTTNIAV
EKFENGSWKVTNIITPSVLIFGPLPNILDYTASLTLQGQQSNPSFEGFGTLSILKVAPEFLLTFSDVTS
NQSSAVLGKSIFCMDPVIALMHELTHSLHQLYGINIPSDKRIRPQVSEGFFSQDGPNVQFEELYTFG
GLDVEIIPQIERSQLREKALGHYKDIAKRLNNINKTIPSSWISNIDKYKKIFSEKYNFDKDNTGNFVVNI
DKFNSLYSDLTNVMSEVVYSSQYNVKNRTHYFSRHYLPVFANILDDNIYTIRDGFNLTNKGFNIENS
GQNIERNPALQKLSSESVVDLFTKVCVDGIITSKTKSDDDDKYADAIFTNSYRKVLGQLSARKLLQDI
MSRALAGGGGSGGGGSGGGGSALALQCIKVKNNRLPYVADKDSISQEIFENKIITDETNVQNYSDK
FSLDESILDGQVPINPEIVDPLLPNVNMEPLNLPGEEIVFYDDITKYVDYLNSYYYLESQKLSNNVENI
TLTTSVEEALGYSNKIYTFLPSLAEKVNKGVQAGLFLNWANEVVEDFTTNIMKKDTLDKISDVSVIIPY
IGPALNIGNSALRGNFNQAFATAGVAFLLEGFPEFTIPALGVFTFYSSIQEREKIIKTIENCLEQRVKR
WKDSYQWMVSNWLSRITTQFNHINYQMYDSLSYQADAIKAKIDLEYKKYSGSDKENIKSQVENLKN
SLDVKISEAMNNINKFIRECSVTYLFKNMLPKVIDELNKFDLRTKTELINLIDSHNIILVGEVDRLKAKV
NESFENTMPFNIFSYTNNSLLKDIINEYFN
SEQ ID60 Protein sequence of the CP-HS_GHRH_1-44-LHD fusion
TWPVKDFNYSDPVNDNDILYLRIPQNKLITTPVKAFMITQNIWVIPERFSSDTNPSLSKPPRPTSKYQ
SYYDPSYLSTDEQKDTFLKGIIKLFKRINERDIGKKLINYLVVGSPFMGDSSTPEDTFDFTRHTTNIAV
EKFENGSWKVTNIITPSVLIFGPLPNILDYTASLTLQGQQSNPSFEGFGTLSILKVAPEFLLTFSDVTS
NQSSAVLGKSIFCMDPVIALMHELTHSLHQLYGINIPSDKRIRPQVSEGFFSQDGPNVQFEELYTFG
GLDVEIIPQIERSQLREKALGHYKDIAKRLNNINKTIPSSWISNIDKYKKIFSEKYNFDKDNTGNFVVNI
DKFNSLYSDLTNVMSEVVYSSQYNVKNRTHYFSRHYLPVFANILDDNIYTIRDGFNLTNKGFNIENS
GQNIERNPALQKLSSESVVDLFTKVCVDGIITSKTKSDDDDKYADAIFTNSYRKVLGQLSARKLLQDI
MSRQQGESNQERGARARLALAGGGGSGGGGSGGGGSALALQCIKVKNNRLPYVADKDSISQEIF
ENKIITDETNVQNYSDKFSLDESILDGQVPINPEIVDPLLPNVNMEPLNLPGEEIVFYDDITKYVDYLN
SYYYLESQKLSNNVENITLTTSVEEALGYSNKIYTFLPSLAEKVNKGVQAGLFLNWANEVVEDFTTNI
MKKDTLDKISDVSVIIPYIGPALNIGNSALRGNFNQAFATAGVAFLLEGFPEFTIPALGVFTFYSSIQER
EKIIKTIENCLEQRVKRWKDSYQWMVSNWLSRITTQFNHINYQMYDSLSYQADAIKAKIDLEYKKYS
GSDKENIKSQVENLKNSLDVKISEAMNNINKFIRECSVTYLFKNMLPKVIDELNKFDLRTKTELINLIDS
HNIILVGEVDRLKAKVNESFENTMPFNIFSYTNNSLLKDIINEYFN
SEQ ID61 Protein sequence of the CP-HS_GHRH_1-40-LHD fusion
TWPVKDFNYSDPVNDNDILYLRIPQNKLITTPVKAFMITQNIWVIPERFSSDTNPSLSKPPRPTSKYQ
SYYDPSYLSTDEQKDTFLKGIIKLFKRINERDIGKKLINYLVVGSPFMGDSSTPEDTFDFTRHTTNIAV
EKFENGSWKVTNIITPSVLIFGPLPNILDYTASLTLQGQQSNPSFEGFGTLSILKVAPEFLLTFSDVTS
NQSSAVLGKSIFCMDPVIALMHELTHSLHQLYGINIPSDKRIRPQVSEGFFSQDGPNVQFEELYTFG
GLDVEIIPQIERSQLREKALGHYKDIAKRLNNINKTIPSSWISNIDKYKKIFSEKYNFDKDNTGNFVVNI
DKFNSLYSDLTNVMSEVVYSSQYNVKNRTHYFSRHYLPVFANILDDNIYTIRDGFNLTNKGFNIENS
GQNIERNPALQKLSSESVVDLFTKVCVDGIITSKTKSDDDDKYADAIFTNSYRKVLGQLSARKLLQDI
MSRQQGESNQERGALAGGGGSGGGGSGGGGSALALQCIKVKNNRLPYVADKDSISQEIFENKIIT
DETNVQNYSDKFSLDESILDGQVPINPEIVDPLLPNVNMEPLNLPGEEIVFYDDITKYVDYLNSYYYL
ESQKLSNNVENITLTTSVEEALGYSNKIYTFLPSLAEKVNKGVQAGLFLNWANEVVEDFTTNIMKKD
TLDKISDVSVIIPYIGPALNIGNSALRGNFNQAFATAGVAFLLEGFPEFTIPALGVFTFYSSIQEREKIIK
TIENCLEQRVKRWKDSYQWMVSNWLSRITTQFNHINYQMYDSLSYQADAIKAKIDLEYKKYSGSDK
ENIKSQVENLKNSLDVKISEAMNNINKFIRECSVTYLFKNMLPKVIDELNKFDLRTKTELINLIDSHNIIL
VGEVDRLKAKVNESFENTMPFNIFSYTNNSLLKDIINEYFN
SEQ ID62 Protein sequence of the CP-HS_GHRH_Ala9-LHD fusion
TWPVKDFNYSDPVNDNDILYLRIPQNKLITTPVKAFMITQNIWVIPERFSSDTNPSLSKPPRPTSKYQ
SYYDPSYLSTDEQKDTFLKGIIKLFKRINERDIGKKLINYLVVGSPFMGDSSTPEDTFDFTRHTTNIAV
EKFENGSWKVTNIITPSVLIFGPLPNILDYTASLTLQGQQSNPSFEGFGTLSILKVAPEFLLTFSDVTS
NQSSAVLGKSIFCMDPVIALMHELTHSLHQLYGINIPSDKRIRPQVSEGFFSQDGPNVQFEELYTFG
GLDVEIIPQIERSQLREKALGHYKDIAKRLNNINKTIPSSWISNIDKYKKIFSEKYNFDKDNTGNFVVNI
DKFNSLYSDLTNVMSEVVYSSQYNVKNRTHYFSRHYLPVFANILDDNIYTIRDGFNLTNKGFNIENS
GQNIERNPALQKLSSESVVDLFTKVCVDGIITSKTKSDDDDKYADAIFTNAYRKVLGQLSARKLLQDI
MSRALAGGGGSGGGGSGGGGSALALQCIKVKNNRLPYVADKDSISQEIFENKIITDETNVQNYSDK
FSLDESILDGQVPINPEIVDPLLPNVNMEPLNLPGEEIVFYDDITKYVDYLNSYYYLESQKLSNNVENI
TLTTSVEEALGYSNKIYTFLPSLAEKVNKGVQAGLFLNWANEVVEDFTTNIMKKDTLDKISDVSVIIPY
IGPALNIGNSALRGNFNQAFATAGVAFLLEGFPEFTIPALGVFTFYSSIQEREKIIKTIENCLEQRVKR
WKDSYQWMVSNWLSRITTQFNHINYQMYDSLSYQADAIKAKIDLEYKKYSGSDKENIKSQVENLKN
SLDVKISEAMNNINKFIRECSVTYLFKNMLPKVIDELNKFDLRTKTELINLIDSHNIILVGEVDRLKAKV
NESFENTMPFNIFSYTNNSLLKDIINEYFN
SEQ ID63 Protein sequence of the CP-HS_GHRH_Ala22-LHD fusion
TWPVKDFNYSDPVNDNDILYLRIPQNKLITTPVKAFMITQNIWVIPERFSSDTNPSLSKPPRPTSKYQ
SYYDPSYLSTDEQKDTFLKGIIKLFKRINERDIGKKLINYLVVGSPFMGDSSTPEDTFDFTRHTTNIAV
EKFENGSWKVTNIITPSVLIFGPLPNILDYTASLTLQGQQSNPSFEGFGTLSILKVAPEFLLTFSDVTS
NQSSAVLGKSIFCMDPVIALMHELTHSLHQLYGINIPSDKRIRPQVSEGFFSQDGPNVQFEELYTFG
GLDVEIIPQIERSQLREKALGHYKDIAKRLNNINKTIPSSWISNIDKYKKIFSEKYNFDKDNTGNFVVNI
DKFNSLYSDLTNVMSEVVYSSQYNVKNRTHYFSRHYLPVFANILDDNIYTIRDGFNLTNKGFNIENS
GQNIERNPALQKLSSESVVDLFTKVCVDGIITSKTKSDDDDKYADAIFTNSYRKVLGQLSARKALQDI
MSRALAGGGGSGGGGSGGGGSALALQCIKVKNNRLPYVADKDSISQEIFENKIITDETNVQNYSDK
FSLDESILDGQVPINPEIVDPLLPNVNMEPLNLPGEEIVFYDDITKYVDYLNSYYYLESQKLSNNVENI
TLTTSVEEALGYSNKIYTFLPSLAEKVNKGVQAGLFLNWANEVVEDFTTNIMKKDTLDKISDVSVIIPY
IGPALNIGNSALRGNFNQAFATAGVAFLLEGFPEFTIPALGVFTFYSSIQEREKIIKTIENCLEQRVKR
WKDSYQWMVSNWLSRITTQFNHINYQMYDSLSYQADAIKAKIDLEYKKYSGSDKENIKSQVENLKN
SLDVKISEAMNNINKFIRECSVTYLFKNMLPKVIDELNKFDLRTKTELINLIDSHNIILVGEVDRLKAKV
NESFENTMPFNIFSYTNNSLLKDIINEYFN
SEQ ID64 Protein sequence CP-HS_GHRH_Ala8_Lys11_1-29-LHD fusion
TWPVKDFNYSDPVNDNDILYLRIPQNKLITTPVKAFMITQNIWVIPERFSSDTNPSLSKPPRPTSKYQ
SYYDPSYLSTDEQKDTFLKGIIKLFKRINERDIGKKLINYLVVGSPFMGDSSTPEDTFDFTRHTTNIAV
EKFENGSWKVTNIITPSVLIFGPLPNILDYTASLTLQGQQSNPSFEGFGTLSILKVAPEFLLTFSDVTS
NQSSAVLGKSIFCMDPVIALMHELTHSLHQLYGINIPSDKRIRPQVSEGFFSQDGPNVQFEELYTFG
GLDVEIIPQIERSQLREKALGHYKDIAKRLNNINKTIPSSWISNIDKYKKIFSEKYNFDKDNTGNFVVNI
DKFNSLYSDLTNVMSEVVYSSQYNVKNRTHYFSRHYLPVFANILDDNIYTIRDGFNLTNKGFNIENS
GQNIERNPALQKLSSESVVDLFTKVCVDGIITSKTKSDDDDKYADAIFTASYKKVLGQLSARKLLQDI
MSRALAGGGGSGGGGSGGGGSALALQCIKVKNNRLPYVADKDSISQEIFENKIITDETNVQNYSDK
FSLDESILDGQVPINPEIVDPLLPNVNMEPLNLPGEEIVFYDDITKYVDYLNSYYYLESQKLSNNVENI
TLTTSVEEALGYSNKIYTFLPSLAEKVNKGVQAGLFLNWANEVVEDFTTNIMKKDTLDKISDVSVIIPY
IGPALNIGNSALRGNFNQAFATAGVAFLLEGFPEFTIPALGVFTFYSSIQEREKIIKTIENCLEQRVKR
WKDSYQWMVSNWLSRITTQFNHINYQMYDSLSYQADAIKAKIDLEYKKYSGSDKENIKSQVENLKN
SLDVKISEAMNNINKFIRECSVTYLFKNMLPKVIDELNKFDLRTKTELINLIDSHNIILVGEVDRLKAKV
NESFENTMPFNIFSYTNNSLLKDIINEYFN
SEQ ID65 Protein CP-HS_GHRH_Ala8_Lys11_Arg12_1-29-LHD fusion
TWPVKDFNYSDPVNDNDILYLRIPQNKLITTPVKAFMITQNIWVIPERFSSDTNPSLSKPPRPTSKYQ
SYYDPSYLSTDEQKDTFLKGIIKLFKRINERDIGKKLINYLVVGSPFMGDSSTPEDTFDFTRHTTNIAV
EKFENGSWKVTNIITPSVLIFGPLPNILDYTASLTLQGQQSNPSFEGFGTLSILKVAPEFLLTFSDVTS
NQSSAVLGKSIFCMDPVIALMHELTHSLHQLYGINIPSDKRIRPQVSEGFFSQDGPNVQFEELYTFG
GLDVEIIPQIERSQLREKALGHYKDIAKRLNNINKTIPSSWISNIDKYKKIFSEKYNFDKDNTGNFVVNI
DKFNSLYSDLTNVMSEVVYSSQYNVKNRTHYFSRHYLPVFANILDDNIYTIRDGFNLTNKGFNIENS
GQNIERNPALQKLSSESVVDLFTKVCVDGIITSKTKSDDDDKYADAIFTASYKRVLGQLSARKLLQDI
MSRALAGGGGSGGGGSGGGGSALALQCIKVKNNRLPYVADKDSISQEIFENKIITDETNVQNYSDK
FSLDESILDGQVPINPEIVDPLLPNVNMEPLNLPGEEIVFYDDITKYVDYLNSYYYLESQKLSNNVENI
TLTTSVEEALGYSNKIYTFLPSLAEKVNKGVQAGLFLNWANEVVEDFTTNIMKKDTLDKISDVSVIIPY
IGPALNIGNSALRGNFNQAFATAGVAFLLEGFPEFTIPALGVFTFYSSIQEREKIIKTIENCLEQRVKR
WKDSYQWMVSNWLSRITTQFNHINYQMYDSLSYQADAIKAKIDLEYKKYSGSDKENIKSQVENLKN
SLDVKISEAMNNINKFIRECSVTYLFKNMLPKVIDELNKFDLRTKTELINLIDSHNIILVGEVDRLKAKV
NESFENTMPFNIFSYTNNSLLKDIINEYFN
SEQ ID66 Protein sequence CP-HS_GHRH_Ala8_Asn11_1-29-LHD fusion
TWPVKDFNYSDPVNDNDILYLRIPQNKLITTPVKAFMITQNIWVIPERFSSDTNPSLSKPPRPTSKYQ
SYYDPSYLSTDEQKDTFLKGIIKLFKRINERDIGKKLINYLVVGSPFMGDSSTPEDTFDFTRHTTNIAV
EKFENGSWKVTNIITPSVLIFGPLPNILDYTASLTLQGQQSNPSFEGFGTLSILKVAPEFLLTFSDVTS
NQSSAVLGKSIFCMDPVIALMHELTHSLHQLYGINIPSDKRIRPQVSEGFFSQDGPNVQFEELYTFG
GLDVEIIPQIERSQLREKALGHYKDIAKRLNNINKTIPSSWISNIDKYKKIFSEKYNFDKDNTGNFVVNI
DKFNSLYSDLTNVMSEVVYSSQYNVKNRTHYFSRHYLPVFANILDDNIYTIRDGFNLTNKGFNIENS
GQNIERNPALQKLSSESVVDLFTKVCVDGIITSKTKSDDDDKYADAIFTASYNKVLGQLSARKLLQDI
MSRALAGGGGSGGGGSGGGGSALALQCIKVKNNRLPYVADKDSISQEIFENKIITDETNVQNYSDK
FSLDESILDGQVPINPEIVDPLLPNVNMEPLNLPGEEIVFYDDITKYVDYLNSYYYLESQKLSNNVENI
TLTTSVEEALGYSNKIYTFLPSLAEKVNKGVQAGLFLNWANEVVEDFTTNIMKKDTLDKISDVSVIIPY
IGPALNIGNSALRGNFNQAFATAGVAFLLEGFPEFTIPALGVFTFYSSIQEREKIIKTIENCLEQRVKR
WKDSYQWMVSNWLSRITTQFNHINYQMYDSLSYQADAIKAKIDLEYKKYSGSDKENIKSQVENLKN
SLDVKISEAMNNINKFIRECSVTYLFKNMLPKVIDELNKFDLRTKTELINLIDSHNIILVGEVDRLKAKV
NESFENTMPFNIFSYTNNSLLKDIINEYFN
SEQ ID67 Protein sequence CP-HS_GHRH_Ala8_Lys20_1-29-LHD fusion
TWPVKDFNYSDPVNDNDILYLRIPQNKLITTPVKAFMITQNIWVIPERFSSDTNPSLSKPPRPTSKYQ
SYYDPSYLSTDEQKDTFLKGIIKLFKRINERDIGKKLINYLVVGSPFMGDSSTPEDTFDFTRHTTNIAV
EKFENGSWKVTNIITPSVLIFGPLPNILDYTASLTLQGQQSNPSFEGFGTLSILKVAPEFLLTFSDVTS
NQSSAVLGKSIFCMDPVIALMHELTHSLHQLYGINIPSDKRIRPQVSEGFFSQDGPNVQFEELYTFG
GLDVEIIPQIERSQLREKALGHYKDIAKRLNNINKTIPSSWISNIDKYKKIFSEKYNFDKDNTGNFVVNI
DKFNSLYSDLTNVMSEVVYSSQYNVKNRTHYFSRHYLPVFANILDDNIYTIRDGFNLTNKGFNIENS
GQNIERNPALQKLSSESVVDLFTKVCVDGIITSKTKSDDDDKYADAIFTASYRKVLGQLSAKKLLQDI
MSRALAGGGGSGGGGSGGGGSALALQCIKVKNNRLPYVADKDSISQEIFENKIITDETNVQNYSDK
FSLDESILDGQVPINPEIVDPLLPNVNMEPLNLPGEEIVFYDDITKYVDYLNSYYYLESQKLSNNVENI
TLTTSVEEALGYSNKIYTFLPSLAEKVNKGVQAGLFLNWANEVVEDFTTNIMKKDTLDKISDVSVIIPY
IGPALNIGNSALRGNFNQAFATAGVAFLLEGFPEFTIPALGVFTFYSSIQEREKIIKTIENCLEQRVKR
WKDSYQWMVSNWLSRITTQFNHINYQMYDSLSYQADAIKAKIDLEYKKYSGSDKENIKSQVENLKN
SLDVKISEAMNNINKFIRECSVTYLFKNMLPKVIDELNKFDLRTKTELINLIDSHNIILVGEVDRLKAKV
NESFENTMPFNIFSYTNNSLLKDIINEYFN
SEQ ID68 Protein CP-HS_GHRH_Ala8_Lys11_Lys20_1-29-LHD fusion
TWPVKDFNYSDPVNDNDILYLRIPQNKLITTPVKAFMITQNIWVIPERFSSDTNPSLSKPPRPTSKYQ
SYYDPSYLSTDEQKDTFLKGIIKLFKRINERDIGKKLINYLVVGSPFMGDSSTPEDTFDFTRHTTNIAV
EKFENGSWKVTNIITPSVLIFGPLPNILDYTASLTLQGQQSNPSFEGFGTLSILKVAPEFLLTFSDVTS
NQSSAVLGKSIFCMDPVIALMHELTHSLHQLYGINIPSDKRIRPQVSEGFFSQDGPNVQFEELYTFG
GLDVEIIPQIERSQLREKALGHYKDIAKRLNNINKTIPSSWISNIDKYKKIFSEKYNFDKDNTGNFVVNI
DKFNSLYSDLTNVMSEVVYSSQYNVKNRTHYFSRHYLPVFANILDDNIYTIRDGFNLTNKGFNIENS
GQNIERNPALQKLSSESVVDLFTKVCVDGIITSKTKSDDDDKYADAIFTASYKKVLGQLSAKKLLQDI
MSRALAGGGGSGGGGSGGGGSALALQCIKVKNNRLPYVADKDSISQEIFENKIITDETNVQNYSDK
FSLDESILDGQVPINPEIVDPLLPNVNMEPLNLPGEEIVFYDDITKYVDYLNSYYYLESQKLSNNVENI
TLTTSVEEALGYSNKIYTFLPSLAEKVNKGVQAGLFLNWANEVVEDFTTNIMKKDTLDKISDVSVIIPY
IGPALNIGNSALRGNFNQAFATAGVAFLLEGFPEFTIPALGVFTFYSSIQEREKIIKTIENCLEQRVKR
WKDSYQWMVSNWLSRITTQFNHINYQMYDSLSYQADAIKAKIDLEYKKYSGSDKENIKSQVENLKN
SLDVKISEAMNNINKFIRECSVTYLFKNMLPKVIDELNKFDLRTKTELINLIDSHNIILVGEVDRLKAKV
NESFENTMPFNIFSYTNNSLLKDIINEYFN
SEQ ID69 Protein sequence CP-HS_GHRH_Ala8_Asn20_1-29-LHD fusion
TWPVKDFNYSDPVNDNDILYLRIPQNKLITTPVKAFMITQNIWVIPERFSSDTNPSLSKPPRPTSKYQ
SYYDPSYLSTDEQKDTFLKGIIKLFKRINERDIGKKLINYLVVGSPFMGDSSTPEDTFDFTRHTTNIAV
EKFENGSWKVTNIITPSVLIFGPLPNILDYTASLTLQGQQSNPSFEGFGTLSILKVAPEFLLTFSDVTS
NQSSAVLGKSIFCMDPVIALMHELTHSLHQLYGINIPSDKRIRPQVSEGFFSQDGPNVQFEELYTFG
GLDVEIIPQIERSQLREKALGHYKDIAKRLNNINKTIPSSWISNIDKYKKIFSEKYNFDKDNTGNFVVNI
DKFNSLYSDLTNVMSEVVYSSQYNVKNRTHYFSRHYLPVFANILDDNIYTIRDGFNLTNKGFNIENS
GQNIERNPALQKLSSESVVDLFTKVCVDGIITSKTKSDDDDKYADAIFTASYRKVLGQLSANKLLQDI
MSRALAGGGGSGGGGSGGGGSALALQCIKVKNNRLPYVADKDSISQEIFENKIITDETNVQNYSDK
FSLDESILDGQVPINPEIVDPLLPNVNMEPLNLPGEEIVFYDDITKYVDYLNSYYYLESQKLSNNVENI
TLTTSVEEALGYSNKIYTFLPSLAEKVNKGVQAGLFLNWANEVVEDFTTNIMKKDTLDKISDVSVIIPY
IGPALNIGNSALRGNFNQAFATAGVAFLLEGFPEFTIPALGVFTFYSSIQEREKIIKTIENCLEQRVKR
WKDSYQWMVSNWLSRITTQFNHINYQMYDSLSYQADAIKAKIDLEYKKYSGSDKENIKSQVENLKN
SLDVKISEAMNNINKFIRECSVTYLFKNMLPKVIDELNKFDLRTKTELINLIDSHNIILVGEVDRLKAKV
NESFENTMPFNIFSYTNNSLLKDIINEYFN
SEQ ID70 Protein sequence CP-HS_GHRH_Ala8_Asn12_1-29-LHD fusion
TWPVKDFNYSDPVNDNDILYLRIPQNKLITTPVKAFMITQNIWVIPERFSSDTNPSLSKPPRPTSKYQ
SYYDPSYLSTDEQKDTFLKGIIKLFKRINERDIGKKLINYLVVGSPFMGDSSTPEDTFDFTRHTTNIAV
EKFENGSWKVTNIITPSVLIFGPLPNILDYTASLTLQGQQSNPSFEGFGTLSILKVAPEFLLTFSDVTS
NQSSAVLGKSIFCMDPVIALMHELTHSLHQLYGINIPSDKRIRPQVSEGFFSQDGPNVQFEELYTFG
GLDVEIIPQIERSQLREKALGHYKDIAKRLNNINKTIPSSWISNIDKYKKIFSEKYNFDKDNTGNFVVNI
DKFNSLYSDLTNVMSEVVYSSQYNVKNRTHYFSRHYLPVFANILDDNIYTIRDGFNLTNKGFNIENS
GQNIERNPALQKLSSESVVDLFTKVCVDGIITSKTKSDDDDKYADAIFTASYRNVLGQLSARKLLQDI
MSRALAGGGGSGGGGSGGGGSALALQCIKVKNNRLPYVADKDSISQEIFENKIITDETNVQNYSDK
FSLDESILDGQVPINPEIVDPLLPNVNMEPLNLPGEEIVFYDDITKYVDYLNSYYYLESQKLSNNVENI
TLTTSVEEALGYSNKIYTFLPSLAEKVNKGVQAGLFLNWANEVVEDFTTNIMKKDTLDKISDVSVIIPY
IGPALNIGNSALRGNFNQAFATAGVAFLLEGFPEFTIPALGVFTFYSSIQEREKIIKTIENCLEQRVKR
WKDSYQWMVSNWLSRITTQFNHINYQMYDSLSYQADAIKAKIDLEYKKYSGSDKENIKSQVENLKN
SLDVKISEAMNNINKFIRECSVTYLFKNMLPKVIDELNKFDLRTKTELINLIDSHNIILVGEVDRLKAKV
NESFENTMPFNIFSYTNNSLLKDIINEYFN
SEQ ID71 Protein sequence CP-HS_GHRH_Ala8_Asn21_1-29-LHD fusion
TWPVKDFNYSDPVNDNDILYLRIPQNKLITTPVKAFMITQNIWVIPERFSSDTNPSLSKPPRPTSKYQ
SYYDPSYLSTDEQKDTFLKGIIKLFKRINERDIGKKLINYLVVGSPFMGDSSTPEDTFDFTRHTTNIAV
EKFENGSWKVTNIITPSVLIFGPLPNILDYTASLTLQGQQSNPSFEGFGTLSILKVAPEFLLTFSDVTS
NQSSAVLGKSIFCMDPVIALMHELTHSLHQLYGINIPSDKRIRPQVSEGFFSQDGPNVQFEELYTFG
GLDVEIIPQIERSQLREKALGHYKDIAKRLNNINKTIPSSWISNIDKYKKIFSEKYNFDKDNTGNFVVNI
DKFNSLYSDLTNVMSEVVYSSQYNVKNRTHYFSRHYLPVFANILDDNIYTIRDGFNLTNKGFNIENS
GQNIERNPALQKLSSESVVDLFTKVCVDGIITSKTKSDDDDKYADAIFTASYRKVLGQLSARNLLQDI
MSRALAGGGGSGGGGSGGGGSALALQCIKVKNNRLPYVADKDSISQEIFENKIITDETNVQNYSDK
FSLDESILDGQVPINPEIVDPLLPNVNMEPLNLPGEEIVFYDDITKYVDYLNSYYYLESQKLSNNVENI
TLTTSVEEALGYSNKIYTFLPSLAEKVNKGVQAGLFLNWANEVVEDFTTNIMKKDTLDKISDVSVIIPY
IGPALNIGNSALRGNFNQAFATAGVAFLLEGFPEFTIPALGVFTFYSSIQEREKIIKTIENCLEQRVKR
WKDSYQWMVSNWLSRITTQFNHINYQMYDSLSYQADAIKAKIDLEYKKYSGSDKENIKSQVENLKN
SLDVKISEAMNNINKFIRECSVTYLFKNMLPKVIDELNKFDLRTKTELINLIDSHNIILVGEVDRLKAKV
NESFENTMPFNIFSYTNNSLLKDIINEYFN
SEQ ID72 Protein sequence CP-HS_GHRH_Ala8_Glu_7_1-29-LHD fusion
TWPVKDFNYSDPVNDNDILYLRIPQNKLITTPVKAFMITQNIWVIPERFSSDTNPSLSKPPRPTSKYQ
SYYDPSYLSTDEQKDTFLKGIIKLFKRINERDIGKKLINYLVVGSPFMGDSSTPEDTFDFTRHTTNIAV
EKFENGSWKVTNIITPSVLIFGPLPNILDYTASLTLQGQQSNPSFEGFGTLSILKVAPEFLLTFSDVTS
NQSSAVLGKSIFCMDPVIALMHELTHSLHQLYGINIPSDKRIRPQVSEGFFSQDGPNVQFEELYTFG
GLDVEIIPQIERSQLREKALGHYKDIAKRLNNINKTIPSSWISNIDKYKKIFSEKYNFDKDNTGNFVVNI
DKFNSLYSDLTNVMSEVVYSSQYNVKNRTHYFSRHYLPVFANILDDNIYTIRDGFNLTNKGFNIENS
GQNIERNPALQKLSSESVVDLFTKVCVDGIITSKTKSDDDDKYADAIFEASYRKVLGQLSARNLLQDI
MSRALAGGGGSGGGGSGGGGSALALQCIKVKNNRLPYVADKDSISQEIFENKIITDETNVQNYSDK
FSLDESILDGQVPINPEIVDPLLPNVNMEPLNLPGEEIVFYDDITKYVDYLNSYYYLESQKLSNNVENI
TLTTSVEEALGYSNKIYTFLPSLAEKVNKGVQAGLFLNWANEVVEDFTTNIMKKDTLDKISDVSVIIPY
IGPALNIGNSALRGNFNQAFATAGVAFLLEGFPEFTIPALGVFTFYSSIQEREKIIKTIENCLEQRVKR
WKDSYQWMVSNWLSRITTQFNHINYQMYDSLSYQADAIKAKIDLEYKKYSGSDKENIKSQVENLKN
SLDVKISEAMNNINKFIRECSVTYLFKNMLPKVIDELNKFDLRTKTELINLIDSHNIILVGEVDRLKAKV
NESFENTMPFNIFSYTNNSLLKDIINEYFN
SEQ ID73 Protein sequence CP-HS_GHRH_Ala8_Glu_10_1-29LHD fusion
TWPVKDFNYSDPVNDNDILYLRIPQNKLITTPVKAFMITQNIWVIPERFSSDTNPSLSKPPRPTSKYQ
SYYDPSYLSTDEQKDTFLKGIIKLFKRINERDIGKKLINYLVVGSPFMGDSSTPEDTFDFTRHTTNIAV
EKFENGSWKVTNIITPSVLIFGPLPNILDYTASLTLQGQQSNPSFEGFGTLSILKVAPEFLLTFSDVTS
NQSSAVLGKSIFCMDPVIALMHELTHSLHQLYGINIPSDKRIRPQVSEGFFSQDGPNVQFEELYTFG
GLDVEIIPQIERSQLREKALGHYKDIAKRLNNINKTIPSSWISNIDKYKKIFSEKYNFDKDNTGNFVVNI
DKFNSLYSDLTNVMSEVVYSSQYNVKNRTHYFSRHYLPVFANILDDNIYTIRDGFNLTNKGFNIENS
GQNIERNPALQKLSSESVVDLFTKVCVDGIITSKTKSDDDDKYADAIFTASERKVLGQLSARKLLQDI
MSRALAGGGGSGGGGSGGGGSALALQCIKVKNNRLPYVADKDSISQEIFENKIITDETNVQNYSDK
FSLDESILDGQVPINPEIVDPLLPNVNMEPLNLPGEEIVFYDDITKYVDYLNSYYYLESQKLSNNVENI
TLTTSVEEALGYSNKIYTFLPSLAEKVNKGVQAGLFLNWANEVVEDFTTNIMKKDTLDKISDVSVIIPY
IGPALNIGNSALRGNFNQAFATAGVAFLLEGFPEFTIPALGVFTFYSSIQEREKIIKTIENCLEQRVKR
WKDSYQWMVSNWLSRITTQFNHINYQMYDSLSYQADAIKAKIDLEYKKYSGSDKENIKSQVENLKN
SLDVKISEAMNNINKFIRECSVTYLFKNMLPKVIDELNKFDLRTKTELINLIDSHNIILVGEVDRLKAKV
NESFENTMPFNIFSYTNNSLLKDIINEYFN
SEQ ID74 Protein sequence CP-HS_GHRH_Ala8_Glu_13_1-29-LHD fusion
TWPVKDFNYSDPVNDNDILYLRIPQNKLITTPVKAFMITQNIWVIPERFSSDTNPSLSKPPRPTSKYQ
SYYDPSYLSTDEQKDTFLKGIIKLFKRINERDIGKKLINYLVVGSPFMGDSSTPEDTFDFTRHTTNIAV
EKFENGSWKVTNIITPSVLIFGPLPNILDYTASLTLQGQQSNPSFEGFGTLSILKVAPEFLLTFSDVTS
NQSSAVLGKSIFCMDPVIALMHELTHSLHQLYGINIPSDKRIRPQVSEGFFSQDGPNVQFEELYTFG
GLDVEIIPQIERSQLREKALGHYKDIAKRLNNINKTIPSSWISNIDKYKKIFSEKYNFDKDNTGNFVVNI
DKFNSLYSDLTNVMSEVVYSSQYNVKNRTHYFSRHYLPVFANILDDNIYTIRDGFNLTNKGFNIENS
GQNIERNPALQKLSSESVVDLFTKVCVDGIITSKTKSDDDDKYADAIFTASYRKELGQLSARKLLQDI
MSRALAGGGGSGGGGSGGGGSALALQCIKVKNNRLPYVADKDSISQEIFENKIITDETNVQNYSDK
FSLDESILDGQVPINPEIVDPLLPNVNMEPLNLPGEEIVFYDDITKYVDYLNSYYYLESQKLSNNVENI
TLTTSVEEALGYSNKIYTFLPSLAEKVNKGVQAGLFLNWANEVVEDFTTNIMKKDTLDKISDVSVIIPY
IGPALNIGNSALRGNFNQAFATAGVAFLLEGFPEFTIPALGVFTFYSSIQEREKIIKTIENCLEQRVKR
WKDSYQWMVSNWLSRITTQFNHINYQMYDSLSYQADAIKAKIDLEYKKYSGSDKENIKSQVENLKN
SLDVKISEAMNNINKFIRECSVTYLFKNMLPKVIDELNKFDLRTKTELINLIDSHNIILVGEVDRLKAKV
NESFENTMPFNIFSYTNNSLLKDIINEYFN
SEQ ID75 Protein sequence of the CP-HS_GHRH_Ala8-LHD fusion
TWPVKDFNYSDPVNDNDILYLRIPQNKLITTPVKAFMITQNIWVIPERFSSDTNPSLSKPPRPTSKYQ
SYYDPSYLSTDEQKDTFLKGIIKLFKRINERDIGKKLINYLVVGSPFMGDSSTPEDTFDFTRHTTNIAV
EKFENGSWKVTNIITPSVLIFGPLPNILDYTASLTLQGQQSNPSFEGFGTLSILKVAPEFLLTFSDVTS
NQSSAVLGKSIFCMDPVIALMHELTHSLHQLYGINIPSDKRIRPQVSEGFFSQDGPNVQFEELYTFG
GLDVEIIPQIERSQLREKALGHYKDIAKRLNNINKTIPSSWISNIDKYKKIFSEKYNFDKDNTGNFVVNI
DKFNSLYSDLTNVMSEVVYSSQYNVKNRTHYFSRHYLPVFANILDDNIYTIRDGFNLTNKGFNIENS
GQNIERNPALQKLSSESVVDLFTKVCVDGIITSKTKSDDDDKYADAIFTASYRKVLGQLSARKLLQDI
MSRALAGGGGSGGGGSGGGGSALALQCIKVKNNRLPYVADKDSISQEIFENKIITDETNVQNYSDK
FSLDESILDGQVPINPEIVDPLLPNVNMEPLNLPGEEIVFYDDITKYVDYLNSYYYLESQKLSNNVENI
TLTTSVEEALGYSNKIYTFLPSLAEKVNKGVQAGLFLNWANEVVEDFTTNIMKKDTLDKISDVSVIIPY
IGPALNIGNSALRGNFNQAFATAGVAFLLEGFPEFTIPALGVFTFYSSIQEREKIIKTIENCLEQRVKR
WKDSYQWMVSNWLSRITTQFNHINYQMYDSLSYQADAIKAKIDLEYKKYSGSDKENIKSQVENLKN
SLDVKISEAMNNINKFIRECSVTYLFKNMLPKVIDELNKFDLRTKTELINLIDSHNIILVGEVDRLKAKV
NESFENTMPFNIFSYTNNSLLKDIINEYFN
SEQ ID76 Protein sequence of the CP-HS_GHRH_Glu8_1-29-LHD fusion
TWPVKDFNYSDPVNDNDILYLRIPQNKLITTPVKAFMITQNIWVIPERFSSDTNPSLSKPPRPTSKYQ
SYYDPSYLSTDEQKDTFLKGIIKLFKRINERDIGKKLINYLVVGSPFMGDSSTPEDTFDFTRHTTNIAV
EKFENGSWKVTNIITPSVLIFGPLPNILDYTASLTLQGQQSNPSFEGFGTLSILKVAPEFLLTFSDVTS
NQSSAVLGKSIFCMDPVIALMHELTHSLHQLYGINIPSDKRIRPQVSEGFFSQDGPNVQFEELYTFG
GLDVEIIPQIERSQLREKALGHYKDIAKRLNNINKTIPSSWISNIDKYKKIFSEKYNFDKDNTGNFVVNI
DKFNSLYSDLTNVMSEVVYSSQYNVKNRTHYFSRHYLPVFANILDDNIYTIRDGFNLTNKGFNIENS
GQNIERNPALQKLSSESVVDLFTKVCVDGIITSKTKSDDDDKYADAIFTESYRKVLGQLSARKLLQDI
MSRALAGGGGSGGGGSGGGGSALALQCIKVKNNRLPYVADKDSISQEIFENKIITDETNVQNYSDK
FSLDESILDGQVPINPEIVDPLLPNVNMEPLNLPGEEIVFYDDITKYVDYLNSYYYLESQKLSNNVENI
TLTTSVEEALGYSNKIYTFLPSLAEKVNKGVQAGLFLNWANEVVEDFTTNIMKKDTLDKISDVSVIIPY
IGPALNIGNSALRGNFNQAFATAGVAFLLEGFPEFTIPALGVFTFYSSIQEREKIIKTIENCLEQRVKR
WKDSYQWMVSNWLSRITTQFNHINYQMYDSLSYQADAIKAKIDLEYKKYSGSDKENIKSQVENLKN
SLDVKISEAMNNINKFIRECSVTYLFKNMLPKVIDELNKFDLRTKTELINLIDSHNIILVGEVDRLKAKV
NESFENTMPFNIFSYTNNSLLKDIINEYFN
SEQ ID77 Protein sequence of the CP-HS_GHRH_Ala15_1-27-LHD fusion
TWPVKDFNYSDPVNDNDILYLRIPQNKLITTPVKAFMITQNIWVIPERFSSDTNPSLSKPPRPTSKYQ
SYYDPSYLSTDEQKDTFLKGIIKLFKRINERDIGKKLINYLVVGSPFMGDSSTPEDTFDFTRHTTNIAV
EKFENGSWKVTNIITPSVLIFGPLPNILDYTASLTLQGQQSNPSFEGFGTLSILKVAPEFLLTFSDVTS
NQSSAVLGKSIFCMDPVIALMHELTHSLHQLYGINIPSDKRIRPQVSEGFFSQDGPNVQFEELYTFG
GLDVEIIPQIERSQLREKALGHYKDIAKRLNNINKTIPSSWISNIDKYKKIFSEKYNFDKDNTGNFVVNI
DKFNSLYSDLTNVMSEVVYSSQYNVKNRTHYFSRHYLPVFANILDDNIYTIRDGFNLTNKGFNIENS
GQNIERNPALQKLSSESVVDLFTKVCVDGIITSKTKSDDDDKYADAIFTNSYRKVLAQLSARKLLQDI
MALAGGGGSGGGGSGGGGSALALQCIKVKNNRLPYVADKDSISQEIFENKIITDETNVQNYSDKFS
LDESILDGQVPINPEIVDPLLPNVNMEPLNLPGEEIVFYDDITKYVDYLNSYYYLESQKLSNNVENITL
TTSVEEALGYSNKIYTFLPSLAEKVNKGVQAGLFLNWANEVVEDFTTNIMKKDTLDKISDVSVIIPYIG
PALNIGNSALRGNFNQAFATAGVAFLLEGFPEFTIPALGVFTFYSSIQEREKIIKTIENCLEQRVKRWK
DSYQWMVSNWLSRITTQFNHINYQMYDSLSYQADAIKAKIDLEYKKYSGSDKENIKSQVENLKNSL
DVKISEAMNNINKFIRECSVTYLFKNMLPKVIDELNKFDLRTKTELINLIDSHNIILVGEVDRLKAKVNE
SFENTMPFNIFSYTNNSLLKDIINEYFN
SEQ ID78 Protein sequence of the CP-HS_GHRH_Ala15-LHD fusion
TWPVKDFNYSDPVNDNDILYLRIPQNKLITTPVKAFMITQNIWVIPERFSSDTNPSLSKPPRPTSKYQ
SYYDPSYLSTDEQKDTFLKGIIKLFKRINERDIGKKLINYLVVGSPFMGDSSTPEDTFDFTRHTTNIAV
EKFENGSWKVTNIITPSVLIFGPLPNILDYTASLTLQGQQSNPSFEGFGTLSILKVAPEFLLTFSDVTS
NQSSAVLGKSIFCMDPVIALMHELTHSLHQLYGINIPSDKRIRPQVSEGFFSQDGPNVQFEELYTFG
GLDVEIIPQIERSQLREKALGHYKDIAKRLNNINKTIPSSWISNIDKYKKIFSEKYNFDKDNTGNFVVNI
DKFNSLYSDLTNVMSEVVYSSQYNVKNRTHYFSRHYLPVFANILDDNIYTIRDGFNLTNKGFNIENS
GQNIERNPALQKLSSESVVDLFTKVCVDGIITSKTKSDDDDKYADAIFTNSYRKVLAQLSARKLLQDI
MSRALAGGGGSGGGGSGGGGSALALQCIKVKNNRLPYVADKDSISQEIFENKIITDETNVQNYSDK
FSLDESILDGQVPINPEIVDPLLPNVNMEPLNLPGEEIVFYDDITKYVDYLNSYYYLESQKLSNNVENI
TLTTSVEEALGYSNKIYTFLPSLAEKVNKGVQAGLFLNWANEVVEDFTTNIMKKDTLDKISDVSVIIPY
IGPALNIGNSALRGNFNQAFATAGVAFLLEGFPEFTIPALGVFTFYSSIQEREKIIKTIENCLEQRVKR
WKDSYQWMVSNWLSRITTQFNHINYQMYDSLSYQADAIKAKIDLEYKKYSGSDKENIKSQVENLKN
SLDVKISEAMNNINKFIRECSVTYLFKNMLPKVIDELNKFDLRTKTELINLIDSHNIILVGEVDRLKAKV
NESFENTMPFNIFSYTNNSLLKDIINEYFN
SEQ ID79 Protein sequence CP-HS_GHRH_Ala8_Ala15_1-29-LHD fusion
TWPVKDFNYSDPVNDNDILYLRIPQNKLITTPVKAFMITQNIWVIPERFSSDTNPSLSKPPRPTSKYQ
SYYDPSYLSTDEQKDTFLKGIIKLFKRINERDIGKKLINYLVVGSPFMGDSSTPEDTFDFTRHTTNIAV
EKFENGSWKVTNIITPSVLIFGPLPNILDYTASLTLQGQQSNPSFEGFGTLSILKVAPEFLLTFSDVTS
NQSSAVLGKSIFCMDPVIALMHELTHSLHQLYGINIPSDKRIRPQVSEGFFSQDGPNVQFEELYTFG
GLDVEIIPQIERSQLREKALGHYKDIAKRLNNINKTIPSSWISNIDKYKKIFSEKYNFDKDNTGNFVVNI
DKFNSLYSDLTNVMSEVVYSSQYNVKNRTHYFSRHYLPVFANILDDNIYTIRDGFNLTNKGFNIENS
GQNIERNPALQKLSSESVVDLFTKVCVDGIITSKTKSDDDDKYADAIFTASYRKVLAQLSARKLLQDI
MSRALAGGGGSGGGGSGGGGSALALQCIKVKNNRLPYVADKDSISQEIFENKIITDETNVQNYSDK
FSLDESILDGQVPINPEIVDPLLPNVNMEPLNLPGEEIVFYDDITKYVDYLNSYYYLESQKLSNNVENI
TLTTSVEEALGYSNKIYTFLPSLAEKVNKGVQAGLFLNWANEVVEDFTTNIMKKDTLDKISDVSVIIPY
IGPALNIGNSALRGNFNQAFATAGVAFLLEGFPEFTIPALGVFTFYSSIQEREKIIKTIENCLEQRVKR
WKDSYQWMVSNWLSRITTQFNHINYQMYDSLSYQADAIKAKIDLEYKKYSGSDKENIKSQVENLKN
SLDVKISEAMNNINKFIRECSVTYLFKNMLPKVIDELNKFDLRTKTELINLIDSHNIILVGEVDRLKAKV
NESFENTMPFNIFSYTNNSLLKDIINEYFN
SEQ ID80 Protein sequence CP-HS_GHRH_Ala8_9_15_22_27-LHD fusion
TWPVKDFNYSDPVNDNDILYLRIPQNKLITTPVKAFMITQNIWVIPERFSSDTNPSLSKPPRPTSKYQ
SYYDPSYLSTDEQKDTFLKGIIKLFKRINERDIGKKLINYLVVGSPFMGDSSTPEDTFDFTRHTTNIAV
EKFENGSWKVTNIITPSVLIFGPLPNILDYTASLTLQGQQSNPSFEGFGTLSILKVAPEFLLTFSDVTS
NQSSAVLGKSIFCMDPVIALMHELTHSLHQLYGINIPSDKRIRPQVSEGFFSQDGPNVQFEELYTFG
GLDVEIIPQIERSQLREKALGHYKDIAKRLNNINKTIPSSWISNIDKYKKIFSEKYNFDKDNTGNFVVNI
DKFNSLYSDLTNVMSEVVYSSQYNVKNRTHYFSRHYLPVFANILDDNIYTIRDGFNLTNKGFNIENS
GQNIERNPALQKLSSESVVDLFTKVCVDGIITSKTKSDDDDKYADAIFTAAYRKVLAQLSARKALQDI
ASRALAGGGGSGGGGSGGGGSALALQCIKVKNNRLPYVADKDSISQEIFENKIITDETNVQNYSDK
FSLDESILDGQVPINPEIVDPLLPNVNMEPLNLPGEEIVFYDDITKYVDYLNSYYYLESQKLSNNVENI
TLTTSVEEALGYSNKIYTFLPSLAEKVNKGVQAGLFLNWANEVVEDFTTNIMKKDTLDKISDVSVIIPY
IGPALNIGNSALRGNFNQAFATAGVAFLLEGFPEFTIPALGVFTFYSSIQEREKIIKTIENCLEQRVKR
WKDSYQWMVSNWLSRITTQFNHINYQMYDSLSYQADAIKAKIDLEYKKYSGSDKENIKSQVENLKN
SLDVKISEAMNNINKFIRECSVTYLFKNMLPKVIDELNKFDLRTKTELINLIDSHNIILVGEVDRLKAKV
NESFENTMPFNIFSYTNNSLLKDIINEYFN
SEQ ID81 Protein sequence of the CP-HS_GHRH_Ala8_9_15_22-LHD fusion
TWPVKDFNYSDPVNDNDILYLRIPQNKLITTPVKAFMITQNIWVIPERFSSDTNPSLSKPPRPTSKYQ
SYYDPSYLSTDEQKDTFLKGIIKLFKRINERDIGKKLINYLVVGSPFMGDSSTPEDTFDFTRHTTNIAV
EKFENGSWKVTNIITPSVLIFGPLPNILDYTASLTLQGQQSNPSFEGFGTLSILKVAPEFLLTFSDVTS
NQSSAVLGKSIFCMDPVIALMHELTHSLHQLYGINIPSDKRIRPQVSEGFFSQDGPNVQFEELYTFG
GLDVEIIPQIERSQLREKALGHYKDIAKRLNNINKTIPSSWISNIDKYKKIFSEKYNFDKDNTGNFVVNI
DKFNSLYSDLTNVMSEVVYSSQYNVKNRTHYFSRHYLPVFANILDDNIYTIRDGFNLTNKGFNIENS
GQNIERNPALQKLSSESVVDLFTKVCVDGIITSKTKSDDDDKYADAIFTAAYRKVLAQLSARKALQDI
MSRALAGGGGSGGGGSGGGGSALALQCIKVKNNRLPYVADKDSISQEIFENKIITDETNVQNYSDK
FSLDESILDGQVPINPEIVDPLLPNVNMEPLNLPGEEIVFYDDITKYVDYLNSYYYLESQKLSNNVENI
TLTTSVEEALGYSNKIYTFLPSLAEKVNKGVQAGLFLNWANEVVEDFTTNIMKKDTLDKISDVSVIIPY
IGPALNIGNSALRGNFNQAFATAGVAFLLEGFPEFTIPALGVFTFYSSIQEREKIIKTIENCLEQRVKR
WKDSYQWMVSNWLSRITTQFNHINYQMYDSLSYQADAIKAKIDLEYKKYSGSDKENIKSQVENLKN
SLDVKISEAMNNINKFIRECSVTYLFKNMLPKVIDELNKFDLRTKTELINLIDSHNIILVGEVDRLKAKV
NESFENTMPFNIFSYTNNSLLKDIINEYFN
SEQ ID82 Protein sequence of the CP-HS_GHRH_HVQAL_1-32-LHD fusion
TWPVKDFNYSDPVNDNDILYLRIPQNKLITTPVKAFMITQNIWVIPERFSSDTNPSLSKPPRPTSKYQ
SYYDPSYLSTDEQKDTFLKGIIKLFKRINERDIGKKLINYLVVGSPFMGDSSTPEDTFDFTRHTTNIAV
EKFENGSWKVTNIITPSVLIFGPLPNILDYTASLTLQGQQSNPSFEGFGTLSILKVAPEFLLTFSDVTS
NQSSAVLGKSIFCMDPVIALMHELTHSLHQLYGINIPSDKRIRPQVSEGFFSQDGPNVQFEELYTFG
GLDVEIIPQIERSQLREKALGHYKDIAKRLNNINKTIPSSWISNIDKYKKIFSEKYNFDKDNTGNFVVNI
DKFNSLYSDLTNVMSEVVYSSQYNVKNRTHYFSRHYLPVFANILDDNIYTIRDGFNLTNKGFNIENS
GQNIERNPALQKLSSESVVDLFTKVCVDGIITSKTKSDDDDKHVDAIFTQSYRKVLAQLSARKALQDI
LSRQQGALAGGGGSGGGGSGGGGSALALQCIKVKNNRLPYVADKDSISQEIFENKIITDETNVQNY
SDKFSLDESILDGQVPINPEIVDPLLPNVNMEPLNLPGEEIVFYDDITKYVDYLNSYYYLESQKLSNN
VENITLTTSVEEALGYSNKIYTFLPSLAEKVNKGVQAGLFLNWANEVVEDFTTNIMKKDTLDKISDVS
VIIPYIGPALNIGNSALRGNFNQAFATAGVAFLLEGFPEFTIPALGVFTFYSSIQEREKIIKTIENCLEQR
VKRWKDSYQWMVSNWLSRITTQFNHINYQMYDSLSYQADAIKAKIDLEYKKYSGSDKENIKSQVEN
LKNSLDVKISEAMNNINKFIRECSVTYLFKNMLPKVIDELNKFDLRTKTELINLIDSHNIILVGEVDRLKA
KVNESFENTMPFNIFSYTNNSLLKDIINEYFN
SEQ ID83 Protein sequence of the CP-HS_GHRH_HVSAL_1-29-LHD fusion
TWPVKDFNYSDPVNDNDILYLRIPQNKLITTPVKAFMITQNIWVIPERFSSDTNPSLSKPPRPTSKYQ
SYYDPSYLSTDEQKDTFLKGIIKLFKRINERDIGKKLINYLVVGSPFMGDSSTPEDTFDFTRHTTNIAV
EKFENGSWKVTNIITPSVLIFGPLPNILDYTASLTLQGQQSNPSFEGFGTLSILKVAPEFLLTFSDVTS
NQSSAVLGKSIFCMDPVIALMHELTHSLHQLYGINIPSDKRIRPQVSEGFFSQDGPNVQFEELYTFG
GLDVEIIPQIERSQLREKALGHYKDIAKRLNNINKTIPSSWISNIDKYKKIFSEKYNFDKDNTGNFVVNI
DKFNSLYSDLTNVMSEVVYSSQYNVKNRTHYFSRHYLPVFANILDDNIYTIRDGFNLTNKGFNIENS
GQNIERNPALQKLSSESVVDLFTKVCVDGIITSKTKSDDDDKHVDAIFTSSYRKVLAQLSARKLLQDI
LSRALAGGGGSGGGGSGGGGSALALQCIKVKNNRLPYVADKDSISQEIFENKIITDETNVQNYSDK
FSLDESILDGQVPINPEIVDPLLPNVNMEPLNLPGEEIVFYDDITKYVDYLNSYYYLESQKLSNNVENI
TLTTSVEEALGYSNKIYTFLPSLAEKVNKGVQAGLFLNWANEVVEDFTTNIMKKDTLDKISDVSVIIPY
IGPALNIGNSALRGNFNQAFATAGVAFLLEGFPEFTIPALGVFTFYSSIQEREKIIKTIENCLEQRVKR
WKDSYQWMVSNWLSRITTQFNHINYQMYDSLSYQADAIKAKIDLEYKKYSGSDKENIKSQVENLKN
SLDVKISEAMNNINKFIRECSVTYLFKNMLPKVIDELNKFDLRTKTELINLIDSHNIILVGEVDRLKAKV
NESFENTMPFNIFSYTNNSLLKDIINEYFN
SEQ ID84 Protein sequence of the CP-HS_GHRH_HVTAL_1-29-LHD fusion
TWPVKDFNYSDPVNDNDILYLRIPQNKLITTPVKAFMITQNIWVIPERFSSDTNPSLSKPPRPTSKYQ
SYYDPSYLSTDEQKDTFLKGIIKLFKRINERDIGKKLINYLVVGSPFMGDSSTPEDTFDFTRHTTNIAV
EKFENGSWKVTNIITPSVLIFGPLPNILDYTASLTLQGQQSNPSFEGFGTLSILKVAPEFLLTFSDVTS
NQSSAVLGKSIFCMDPVIALMHELTHSLHQLYGINIPSDKRIRPQVSEGFFSQDGPNVQFEELYTFG
GLDVEIIPQIERSQLREKALGHYKDIAKRLNNINKTIPSSWISNIDKYKKIFSEKYNFDKDNTGNFVVNI
DKFNSLYSDLTNVMSEVVYSSQYNVKNRTHYFSRHYLPVFANILDDNIYTIRDGFNLTNKGFNIENS
GQNIERNPALQKLSSESVVDLFTKVCVDGIITSKTKSDDDDKHVDAIFTTSYRKVLAQLSARKLLQDI
LSRALAGGGGSGGGGSGGGGSALALQCIKVKNNRLPYVADKDSISQEIFENKIITDETNVQNYSDK
FSLDESILDGQVPINPEIVDPLLPNVNMEPLNLPGEEIVFYDDITKYVDYLNSYYYLESQKLSNNVENI
TLTTSVEEALGYSNKIYTFLPSLAEKVNKGVQAGLFLNWANEVVEDFTTNIMKKDTLDKISDVSVIIPY
IGPALNIGNSALRGNFNQAFATAGVAFLLEGFPEFTIPALGVFTFYSSIQEREKIIKTIENCLEQRVKR
WKDSYQWMVSNWLSRITTQFNHINYQMYDSLSYQADAIKAKIDLEYKKYSGSDKENIKSQVENLKN
SLDVKISEAMNNINKFIRECSVTYLFKNMLPKVIDELNKFDLRTKTELINLIDSHNIILVGEVDRLKAKV
NESFENTMPFNIFSYTNNSLLKDIINEYFN
SEQ ID85 Protein sequence of the CP-HS_GHRH_QALN-LHD fusion
TWPVKDFNYSDPVNDNDILYLRIPQNKLITTPVKAFMITQNIWVIPERFSSDTNPSLSKPPRPTSKYQ
SYYDPSYLSTDEQKDTFLKGIIKLFKRINERDIGKKLINYLVVGSPFMGDSSTPEDTFDFTRHTTNIAV
EKFENGSWKVTNIITPSVLIFGPLPNILDYTASLTLQGQQSNPSFEGFGTLSILKVAPEFLLTFSDVTS
NQSSAVLGKSIFCMDPVIALMHELTHSLHQLYGINIPSDKRIRPQVSEGFFSQDGPNVQFEELYTFG
GLDVEIIPQIERSQLREKALGHYKDIAKRLNNINKTIPSSWISNIDKYKKIFSEKYNFDKDNTGNFVVNI
DKFNSLYSDLTNVMSEVVYSSQYNVKNRTHYFSRHYLPVFANILDDNIYTIRDGFNLTNKGFNIENS
GQNIERNPALQKLSSESVVDLFTKVCVDGIITSKTKSDDDDKYADAIFTQSYRKVLAQLSARKALQDI
LNRALAGGGGSGGGGSGGGGSALALQCIKVKNNRLPYVADKDSISQEIFENKIITDETNVQNYSDK
FSLDESILDGQVPINPEIVDPLLPNVNMEPLNLPGEEIVFYDDITKYVDYLNSYYYLESQKLSNNVENI
TLTTSVEEALGYSNKIYTFLPSLAEKVNKGVQAGLFLNWANEVVEDFTTNIMKKDTLDKISDVSVIIPY
IGPALNIGNSALRGNFNQAFATAGVAFLLEGFPEFTIPALGVFTFYSSIQEREKIIKTIENCLEQRVKR
WKDSYQWMVSNWLSRITTQFNHINYQMYDSLSYQADAIKAKIDLEYKKYSGSDKENIKSQVENLKN
SLDVKISEAMNNINKFIRECSVTYLFKNMLPKVIDELNKFDLRTKTELINLIDSHNIILVGEVDRLKAKV
NESFENTMPFNIFSYTNNSLLKDIINEYFN
SEQ ID86 Protein sequence of the CP-HS_GHRH_QAL-LHD fusion
TWPVKDFNYSDPVNDNDILYLRIPQNKLITTPVKAFMITQNIWVIPERFSSDTNPSLSKPPRPTSKYQ
SYYDPSYLSTDEQKDTFLKGIIKLFKRINERDIGKKLINYLVVGSPFMGDSSTPEDTFDFTRHTTNIAV
EKFENGSWKVTNIITPSVLIFGPLPNILDYTASLTLQGQQSNPSFEGFGTLSILKVAPEFLLTFSDVTS
NQSSAVLGKSIFCMDPVIALMHELTHSLHQLYGINIPSDKRIRPQVSEGFFSQDGPNVQFEELYTFG
GLDVEIIPQIERSQLREKALGHYKDIAKRLNNINKTIPSSWISNIDKYKKIFSEKYNFDKDNTGNFVVNI
DKFNSLYSDLTNVMSEVVYSSQYNVKNRTHYFSRHYLPVFANILDDNIYTIRDGFNLTNKGFNIENS
GQNIERNPALQKLSSESVVDLFTKVCVDGIITSKTKSDDDDKYADAIFTQSYRKVLAQLSARKALQDI
LSRALAGGGGSGGGGSGGGGSALALQCIKVKNNRLPYVADKDSISQEIFENKIITDETNVQNYSDK
FSLDESILDGQVPINPEIVDPLLPNVNMEPLNLPGEEIVFYDDITKYVDYLNSYYYLESQKLSNNVENI
TLTTSVEEALGYSNKIYTFLPSLAEKVNKGVQAGLFLNWANEVVEDFTTNIMKKDTLDKISDVSVIIPY
IGPALNIGNSALRGNFNQAFATAGVAFLLEGFPEFTIPALGVFTFYSSIQEREKIIKTIENCLEQRVKR
WKDSYQWMVSNWLSRITTQFNHINYQMYDSLSYQADAIKAKIDLEYKKYSGSDKENIKSQVENLKN
SLDVKISEAMNNINKFIRECSVTYLFKNMLPKVIDELNKFDLRTKTELINLIDSHNIILVGEVDRLKAKV
NESFENTMPFNIFSYTNNSLLKDIINEYFN
SEQ ID87 Protein sequence of the CP-hGHRH29 N8A M27L-LHD fusion
TWPVKDFNYSDPVNDNDILYLRIPQNKLITTPVKAFMITQNIWVIPERFSSDTNPSLSKPPRPTSKYQ
SYYDPSYLSTDEQKDTFLKGIIKLFKRINERDIGKKLINYLVVGSPFMGDSSTPEDTFDFTRHTTNIAV
EKFENGSWKVTNIITPSVLIFGPLPNILDYTASLTLQGQQSNPSFEGFGTLSILKVAPEFLLTFSDVTS
NQSSAVLGKSIFCMDPVIALMHELTHSLHQLYGINIPSDKRIRPQVSEGFFSQDGPNVQFEELYTFG
GLDVEIIPQIERSQLREKALGHYKDIAKRLNNINKTIPSSWISNIDKYKKIFSEKYNFDKDNTGNFVVNI
DKFNSLYSDLTNVMSEVVYSSQYNVKNRTHYFSRHYLPVFANILDDNIYTIRDGFNLTNKGFNIENS
GQNIERNPALQKLSSESVVDLFTKVCVDGIITSKTKSIEGRYADAIFTASYRKVLGQLSARKLLQDILS
RALAGGGGSGGGGSGGGGSALALQCIKVKNNRLPYVADKDSISQEIFENKIITDETNVQNYSDKFS
LDESILDGQVPINPEIVDPLLPNVNMEPLNLPGEEIVFYDDITKYVDYLNSYYYLESQKLSNNVENITL
TTSVEEALGYSNKIYTFLPSLAEKVNKGVQAGLFLNWANEVVEDFTTNIMKKDTLDKISDVSVIIPYIG
PALNIGNSALRGNFNQAFATAGVAFLLEGFPEFTIPALGVFTFYSSIQEREKIIKTIENCLEQRVKRWK
DSYQWMVSNWLSRITTQFNHINYQMYDSLSYQADAIKAKIDLEYKKYSGSDKENIKSQVENLKNSL
DVKISEAMNNINKFIRECSVTYLFKNMLPKVIDELNKFDLRTKTELINLIDSHNIILVGEVDRLKAKVNE
SFENTMPFNIFSYTNNSLLKDIINEYFN
SEQ ID88 Protein sequence LHD CP Human GHRH 1-40 fusion
MTWPVKDFNYSDPVNDNDILYLRIPQNKLITTPVKAFMITQNIWVIPERFSSDTNPSLSKPPRPTS
KYQSYYDPSYLSTDEQKDTFLKGIIKLFKRINERDIGKKLINYLVVGSPFMGDSSTPEDTFDFTRHT
TNlAVEKFENGSWKVTNIITPSVLIFGPLPNILDYTASLTLQGQQSNPSFEGFGTLSILKVAPEFLLT
FSDVTSNQSSAVLGKSIFCMDPVIALMHELTHSLHQLYGINIPSDKRIRPQVSEGFFSQDGPNVQF
EELYTFGGLDVEIIPQIERSQLREKALGHYKDIAKRLNNINKTIPSSWISNIDKYKKIFSEKYNFDKD
NTGNFVVNIDKFNSLYSDLTNVMSEVVYSSQYNVKNRTHYFSRHYLPVFANILDDNIYTIRDGFNL
TNKGFNIENSGQNIERNPALQKLSSESVVDLFTKVCVDGIITSKTKSLIEGRYADAIFTNSYRKVLG
QLSARKLLQDIMSRQQGESNQERGALAGGGGSGGGGSGGGGSALVLQCIKVKNNRLPYVADK
DSISQEIFENKIITDETNVQNYSDKFSLDESILDGQVPINPEIVDPLLPNVNMEPLNLPGEEIVFYDDI
TKYVDYLNSYYYLESQKLSNNVENITLTTSVEEALGYSNKIYTFLPSLAEKVNKGVQAGLFLNWAN
EVVEDFTTNIMKKDTLDKISDVSVIIPYIGPALNIGNSALRGNFNQAFATAGVAFLLEGFPEFTIPAL
GVFTFYSSIQEREKIIKTIENCLEQRVKRWKDSYQWMVSNWLSRITTQFNHINYQMYDSLSYQAD
AIKAKIDLEYKKYSGSDKENIKSQVENLKNSLDVKISEAMNNINKFIRECSVTYLFKNMLPKVIDELN
KFDLRTKTELINLIDSHNIILVGEVDRLKAKVNESFENTMPFNIFSYTNNSLLKDIINEYF
SEQ ID89 Protein sequence LHD CP Human GHRH 1-44 fusion
MTWPVKDFNYSDPVNDNDILYLRIPQNKLITTPVKAFMITQNIWVIPERFSSDTNPSLSKPPRPTS
KYQSYYDPSYLSTDEQKDTFLKGIIKLFKRINERDIGKKLINYLVVGSPFMGDSSTPEDTFDFTRHT
TNIAVEKFENGSWKVTNIITPSVLIFGPLPNILDYTASLTLQGQQSNPSFEGFGTLSILKVAPEFLLT
FSDVTSNQSSAVLGKSIFCMDPVIALMHELTHSLHQLYGINIPSDKRIRPQVSEGFFSQDGPNVQF
EELYTFGGLDVEIIPQIERSQLREKALGHYKDIAKRLNNINKTIPSSWISNIDKYKKIFSEKYNFDKD
NTGNFVVNIDKFNSLYSDLTNVMSEVVYSSQYNVKNRTHYFSRHYLPVFANILDDNIYTIRDGFNL
TNKGFNIENSGQNIERNPALQKLSSESVVDLFTKVCVDGIITSKTKSLIEGRYADAIFTNSYRKVLG
QLSARKLLQDIMSRQQGESNQERGARARLLAGGGGSGGGGSGGGGSALVLQCIKVKNNRLPY
VADKDSISQEIFENKIITDETNVQNYSDKFSLDESILDGQVPINPEIVDPLLPNVNMEPLNLPGEEIV
FYDDITKYVDYLNSYYYLESQKLSNNVENITLTTSVEEALGYSNKIYTFLPSLAEKVNKGVQAGLFL
NWANEVVEDFTTNIMKKDTLDKISDVSVIIPYIGPALNIGNSALRGNFNQAFATAGVAFLLEGFPEF
TIPALGVFTFYSSIQEREKIIKTIENCLEQRVKRWKDSYQWMVSNWLSRITTQFNHINYQMYDSLS
YQADAIKAKIDLEYKKYSGSDKENIKSQVENLKNSLDVKISEAMNNINKFIRECSVTYLFKNMLPKV
IDELNKFDLRTKTELINLIDSHNIILVGEVDRLKAKVNESFENTMPFNIFSYTNNSLLKDIINEYF
SEQ ID90 Protein sequence LHD CP Human GHRH 1-29 Arg substituted at position 9
fusion
MTWPVKDFNYSDPVNDNDILYLRIPQNKLITTPVKAFMITQNIWVIPERFSSDTNPSLSKPPRPTS
KYQSYYDPSYLSTDEQKDTFLKGIIKLFKRINERDIGKKLINYLVVGSPFMGDSSTPEDTFDFTRHT
TNIAVEKFENGSWKVTNIITPSVLIFGPLPNILDYTASLTLQGQQSNPSFEGFGTLSILKVAPEFLLT
FSDVTSNQSSAVLGKSIFCMDPVIALMHELTHSLHQLYGINIPSDKRIRPQVSEGFFSQDGPNVQF
EELYTFGGLDVEIIPQIERSQLREKALGHYKDIAKRLNNINKTIPSSWISNIDKYKKIFSEKYNFDKD
NTGNFVVNIDKFNSLYSDLTNVMSEVVYSSQYNVKNRTHYFSRHYLPVFANILDDNIYTIRDGFNL
TNKGFNIENSGQNIERNPALQKLSSESVVDLFTKVCVDGIITSKTKSLIEGRYADAIFTNRYRKVLG
QLSARKLLQDIMSRLAGGGGSGGGGSGGGGSALVLQCIKVKNNRLPYVADKDSISQEIFENKIIT
DETNVQNYSDKFSLDESILDGQVPINPEIVDPLLPNVNMEPLNLPGEEIVFYDDITKYVDYLNSYYY
LESQKLSNNVENITLTTSVEEALGYSNKIYTFLPSLAEKVNKGVQAGLFLNWANEVVEDFTTNIMK
KDTLDKISDVSVIIPYIGPALNIGNSALRGNFNQAFATAGVAFLLEGFPEFTIPALGVFTFYSSIQER
EKIIKTIENCLEQRVKRWKDSYQWMVSNWLSRITTQFNHINYQMYDSLSYQADAIKAKIDLEYKKY
SGSDKENIKSQVENLKNSLDVKISEAMNNINKFIRECSVTYLFKNMLPKVIDELNKFDLRTKTELIN
LIDSHNIILVGEVDRLKAKVNESFENTMPFNIFSYTNNSLLKDIINEYF
SEQ ID91 Protein sequence LHD CP Human GHRH1-29 Ala substituted at position 8, Arg
substituted at position 9 fusion
MTWPVKDFNYSDPVNDNDILYLRIPQNKLITTPVKAFMITQNIWVIPERFSSDTNPSLSKPPRPTS
KYQSYYDPSYLSTDEQKDTFLKGIIKLFKRINERDIGKKLINYLVVGSPFMGDSSTPEDTFDFTRHT
TNIAVEKFENGSWKVTNIITPSVLIFGPLPNILDYTASLTLQGQQSNPSFEGFGTLSILKVAPEFLLT
FSDVTSNQSSAVLGKSIFCMDPVIALMHELTHSLHQLYGINIPSDKRIRPQVSEGFFSQDGPNVQF
EELYTFGGLDVEIIPQIERSQLREKALGHYKDIAKRLNNINKTIPSSWISNIDKYKKIFSEKYNFDKD
NTGNFVVNIDKFNSLYSDLTNVMSEVVYSSQYNVKNRTHYFSRHYLPVFANILDDNIYTIRDGFNL
TNKGFNIENSGQNIERNPALQKLSSESVVDLFTKVCVDGIITSKTKSLIEGRYADAIFTARYRKVLG
QLSARKLLQDIMSRLAGGGGSGGGGSGGGGSALVLQCIKVKNNRLPYVADKDSISQEIFENKIIT
DETNVQNYSDKFSLDESILDGQVPINPEIVDPLLPNVNMEPLNLPGEEIVFYDDITKYVDYLNSYYY
LESQKLSNNVENITLTTSVEEALGYSNKIYTFLPSLAEKVNKGVQAGLFLNWANEVVEDFTTNIMK
KDTLDKISDVSVIIPYIGPALNIGNSALRGNFNQAFATAGVAFLLEGFPEFTIPALGVFTFYSSIQER
EKIIKTIENCLEQRVKRWKDSYQWMVSNWLSRITTQFNHINYQMYDSLSYQADAIKAKIDLEYKKY
SGSDKENIKSQVENLKNSLDVKISEAMNNINKFIRECSVTYLFKNMLPKVIDELNKFDLRTKTELIN
LIDSHNIILVGEVDRLKAKVNESFENTMPFNIFSYTNNSLLKDIINEYF
SEQ ID92 Protein sequence LHD CP Human GHRH1-40 Arg substituted at position 9
fusion
MTWPVKDFNYSDPVNDNDILYLRIPQNKLITTPVKAFMITQNIWVIPERFSSDTNPSLSKPPRPTS
KYQSYYDPSYLSTDEQKDTFLKGIIKLFKRINERDIGKKLINYLVVGSPFMGDSSTPEDTFDFTRHT
TNIAVEKFENGSWKVTNIITPSVLIFGPLPNILDYTASLTLQGQQSNPSFEGFGTLSILKVAPEFLLT
FSDVTSNQSSAVLGKSIFCMDPVIALMHELTHSLHQLYGINIPSDKRIRPQVSEGFFSQDGPNVQF
EELYTFGGLDVEIIPQIERSQLREKALGHYKDIAKRLNNINKTIPSSWISNIDKYKKIFSEKYNFDKD
NTGNFVVNIDKFNSLYSDLTNVMSEVVYSSQYNVKNRTHYFSRHYLPVFANILDDNIYTIRDGFNL
TNKGFNIENSGQNIERNPALQKLSSESVVDLFTKVCVDGIITSKTKSLIEGRYADAIFTNRYRKVLG
QLSARKLLQDIMSRQQGESNQERGALAGGGGSGGGGSGGGGSALVLQCIKVKNNRLPYVADK
DSISQEIFENKIITDETNVQNYSDKFSLDESILDGQVPINPEIVDPLLPNVNMEPLNLPGEEIVFYDDI
TKYVDYLNSYYYLESQKLSNNVENITLTTSVEEALGYSNKIYTFLPSLAEKVNKGVQAGLFLNWAN
EVVEDFTTNIMKKDTLDKISDVSVIIPYIGPALNIGNSALRGNFNQAFATAGVAFLLEGFPEFTIPAL
GVFTFYSSIQEREKIIKTIENCLEQRVKRWKDSYQWMVSNWLSRITTQFNHINYQMYDSLSYQAD
AIKAKIDLEYKKYSGSDKENIKSQVENLKNSLDVKISEAMNNINKFIRECSVTYLFKNMLPKVIDELN
KFDLRTKTELINLIDSHNIILVGEVDRLKAKVNESFENTMPFNIFSYTNNSLLKDIINEYF
SEQ ID93 Protein sequence LHD CP Human GHRH1-44 Arg substituted at position 9
fusion
MTWPVKDFNYSDPVNDNDILYLRIPQNKLITTPVKAFMITQNIWVIPERFSSDTNPSLSKPPRPTS
KYQSYYDPSYLSTDEQKDTFLKGIIKLFKRINERDIGKKLINYLVVGSPFMGDSSTPEDTFDFTRHT
TNIAVEKFENGSWKVTNIITPSVLIFGPLPNILDYTASLTLQGQQSNPSFEGFGTLSILKVAPEFLLT
FSDVTSNQSSAVLGKSIFCMDPVIALMHELTHSLHQLYGINIPSDKRIRPQVSEGFFSQDGPNVQF
EELYTFGGLDVEIIPQIERSQLREKALGHYKDIAKRLNNINKTIPSSWISNIDKYKKIFSEKYNFDKD
NTGNFVVNIDKFNSLYSDLTNVMSEVVYSSQYNVKNRTHYFSRHYLPVFANILDDNIYTIRDGFNL
TNKGFNIENSGQNIERNPALQKLSSESVVDLFTKVCVDGIITSKTKSLIEGRYADAIFTNRYRKVLG
QLSARKLLQDIMSRQQGESNQERGARARLLAGGGGSGGGGSGGGGSALVLQCIKVKNNRLPY
VADKDSISQEIFENKIITDETNVQNYSDKFSLDESILDGQVPINPEIVDPLLPNVNMEPLNLPGEEIV
FYDDITKYVDYLNSYYYLESQKLSNNVENITLTTSVEEALGYSNKIYTFLPSLAEKVNKGVQAGLFL
NWANEVVEDFTTNIMKKDTLDKISDVSVIIPYIGPALNIGNSALRGNFNQAFATAGVAFLLEGFPEF
TIPALGVFTFYSSIQEREKIIKTIENCLEQRVKRWKDSYQWMVSNWLSRITTQFNHINYQMYDSLS
YQADAIKAKIDLEYKKYSGSDKENIKSQVENLKNSLDVKISEAMNNINKFIRECSVTYLFKNMLPKV
IDELNKFDLRTKTELINLIDSHNIILVGEVDRLKAKVNESFENTMPFNIFSYTNNSLLKDIINEYF
SEQ ID94 Protein sequence LHD CP Human GHRH1-29 Arg substituted at position 14, 15,
16 and 17 fusion
MTWPVKDFNYSDPVNDNDILYLRIPQNKLITTPVKAFMITQNIWVIPERFSSDTNPSLSKPPRPTS
KYQSYYDPSYLSTDEQKDTFLKGIIKLFKRINERDIGKKLINYLVVGSPFMGDSSTPEDTFDFTRHT
TNIAVEKFENGSWKVTNIITPSVLIFGPLPNILDYTASLTLQGQQSNPSFEGFGTLSILKVAPEFLLT
FSDVTSNQSSAVLGKSIFCMDPVIALMHELTHSLHQLYGINIPSDKRIRPQVSEGFFSQDGPNVQF
EELYTFGGLDVEIIPQIERSQLREKALGHYKDIAKRLNNINKTIPSSWISNIDKYKKIFSEKYNFDKD
NTGNFVVNIDKFNSLYSDLTNVMSEVVYSSQYNVKNRTHYFSRHYLPVFANILDDNIYTIRDGFNL
TNKGFNIENSGQNIERNPALQKLSSESVVDLFTKVCVDGIITSKTKSLIEGRYADAIFTNSYRKVRR
RRSARKLLQDIMSRLAGGGGSGGGGSGGGGSALVLQCIKVKNNRLPYVADKDSISQEIFENKIIT
DETNVQNYSDKFSLDESILDGQVPINPEIVDPLLPNVNMEPLNLPGEEIVFYDDITKYVDYLNSYYY
LESQKLSNNVENITLTTSVEEALGYSNKIYTFLPSLAEKVNKGVQAGLFLNWANEVVEDFTTNIMK
KDTLDKISDVSVIIPYIGPALNIGNSALRGNFNQAFATAGVAFLLEGFPEFTIPALGVFTFYSSIQER
EKIIKTIENCLEQRVKRWKDSYQWMVSNWLSRITTQFNHINYQMYDSLSYQADAIKAKIDLEYKKY
SGSDKENIKSQVENLKNSLDVKISEAMNNINKFIRECSVTYLFKNMLPKVIDELNKFDLRTKTELIN
LIDSHNIILVGEVDRLKAKVNESFENTMPFNIFSYTNNSLLKDIINEYF
SEQ ID95 Protein sequence LHD CP Human GHRH1-40 Ala substituted at position 8 fusion
MTWPVKDFNYSDPVNDNDILYLRIPQNKLITTPVKAFMITQNIWVIPERFSSDTNPSLSKPPRPTS
KYQSYYDPSYLSTDEQKDTFLKGIIKLFKRINERDIGKKLINYLVVGSPFMGDSSTPEDTFDFTRHT
TNIAVEKFENGSWKVTNIITPSVLIFGPLPNILDYTASLTLQGQQSNPSFEGFGTLSILKVAPEFLLT
FSDVTSNQSSAVLGKSIFCMDPVIALMHELTHSLHQLYGINIPSDKRIRPQVSEGFFSQDGPNVQF
EELYTFGGLDVEIIPQIERSQLREKALGHYKDIAKRLNNINKTIPSSWISNIDKYKKIFSEKYNFDKD
NTGNFVVNIDKFNSLYSDLTNVMSEVVYSSQYNVKNRTHYFSRHYLPVFANILDDNIYTIRDGFNL
TNKGFNIENSGQNIERNPALQKLSSESVVDLFTKVCVDGIITSKTKSLIEGRYADAIFTASYRKVLG
QLSARKLLQDIMSRQQGESNQERGALAGGGGSGGGGSGGGGSALVLQCIKVKNNRLPYVADK
DSISQEIFENKIITDETNVQNYSDKFSLDESILDGQVPINPEIVDPLLPNVNMEPLNLPGEEIVFYDDI
TKYVDYLNSYYYLESQKLSNNVENITLTTSVEEALGYSNKIYTFLPSLAEKVNKGVQAGLFLNWAN
EVVEDFTTNIMKKDTLDKISDVSVIIPYIGPALNIGNSALRGNFNQAFATAGVAFLLEGFPEFTIPAL
GVFTFYSSIQEREKIIKTIENCLEQRVKRWKDSYQWMVSNWLSRITTQFNHINYQMYDSLSYQAD
AIKAKIDLEYKKYSGSDKENIKSQVENLKNSLDVKISEAMNNINKFIRECSVTYLFKNMLPKVIDELN
KFDLRTKTELINLIDSHNIILVGEVDRLKAKVNESFENTMPFNIFSYTNNSLLKDIINEYF
SEQ ID96 Protein sequence LHC CP Human GHRH 1-40 fusion
PITINNFNYSDPVDNKNILYLDTHLNTLANEPEKAFRITGNIWVIPDRFSRNSNPNLNKPPRVTSPK
SGYYDPNYLSTDSDKDTFLKEIIKLFKRINSREIGEELIYRLSTDIPFPGNNNTPINTFDFDVDFNSV
DVKTRQGNNWVKTGSINPSVIITGPRENIIDPETSTFKLTNNTFAAQEGFGALSIISISPRFMLTYSN
ATNDVGEGRFSKSEFCMDPILILMHELNHAMHNLYGIAIPNDQTISSVTSNIFYSQYNVKLEYAEIY
AFGGPTIDLIPKSARKYFEEKALDYYRSIAKRLNSITTANPSSFNKYIGEYKQKLIRKYRFVVESSG
EVTVNRNKFVELYNELTQIFTEFNYAKIYNVQNRKIYLSNVYTPVTANILDDNVYDIQNGFNIPKSN
LNVLFMGQNLSRNPALRKVNPENMLYLFTKFCVDGIITSKTKSLIEGRYADAIFTNSYRKVLGQLS
ARKLLQDIMSRQQGESNQERGALAGGGGSGGGGSGGGGSALVLQCRELLVKNTDLPFIGDISD
VKTDIFLRKDINEETEVIYYPDNVSVDQVILSKNTSEHGQLDLLYPSIDSESEILPGENQVFYDNRT
QNVDYLNSYYYLESQKLSDNVEDFTFTRSIEEALDNSAKVYTYFPTLANKVNAGVQGGLFLMWA
NDVVEDFTTNILRKDTLDKISDVSAIIPYIGPALNISNSVRRGNFTEAFAVTGVTILLEAFPEFTIPAL
GAFVIYSKVQERNEIIKTIDNCLEQRIKRWKDSYEWMMGTWLSRIITQFNNISYQMYDSLNYQAG
AIKAKIDLEYKKYSGSDKENIKSQVENLKNSLDVKISEAMNNINKFIRECSVTYLFKNMLPKVIDELN
EFDRNTKAKLINLIDSHNIILVGEVDKLKAKVNNSFQNTIPFNIFSYTNNSLLKDIINEYFN
SEQ ID97 Protein sequence LHC CP Human GHRH 1-44 fusion
PITINNFNYSDPVDNKNILYLDTHLNTLANEPEKAFRITGNIWVIPDRFSRNSNPNLNKPPRVTSPK
SGYYDPNYLSTDSDKDTFLKEIIKLFKRINSREIGEELIYRLSTDIPFPGNNNTPINTFDFDVDFNSV
DVKTRQGNNWVKTGSINPSVIITGPRENIIDPETSTFKLTNNTFAAQEGFGALSIISISPRFMLTYSN
ATNDVGEGRFSKSEFCMDPILILMHELNHAMHNLYGIAIPNDQTISSVTSNIFYSQYNVKLEYAEIY
AFGGPTIDLIPKSARKYFEEKALDYYRSIAKRLNSITTANPSSFNKYIGEYKQKLIRKYRFVVESSG
EVTVNRNKFVELYNELTQIFTEFNYAKIYNVQNRKIYLSNVYTPVTANILDDNVYDIQNGFNIPKSN
LNVLFMGQNLSRNPALRKVNPENMLYLFTKFCVDGIITSKTKSLIEGRYADAIFTNSYRKVLGQLS
ARKLLQDIMSRQQGESNQERGARARLLAGGGGSGGGGSGGGGSALVLQCRELLVKNTDLPFIG
DISDVKTDIFLRKDINEETEVIYYPDNVSVDQVILSKNTSEHGQLDLLYPSIDSESEILPGENQVFYD
NRTQNVDYLNSYYYLESQKLSDNVEDFTFTRSIEEALDNSAKVYTYFPTLANKVNAGVQGGLFL
MWANDVVEDFTTNILRKDTLDKISDVSAIIPYIGPALNISNSVRRGNFTEAFAVTGVTILLEAFPEFTI
PALGAFVIYSKVQERNEIIKTIDNCLEQRIKRWKDSYEWMMGTWLSRIITQFNNISYQMYDSLNYQ
AGAIKAKIDLEYKKYSGSDKENIKSQVENLKNSLDVKISEAMNNINKFIRECSVTYLFKNMLPKVID
ELNEFDRNTKAKLINLIDSHNIILVGEVDKLKAKVNNSFQNTIPFNIFSYTNNSLLKDIINEYFN
SEQ ID98 Protein sequence LHC CP Human GHRH 1-29 Arg substituted at position 9
fusion
PITINNFNYSDPVDNKNILYLDTHLNTLANEPEKAFRITGNIWVIPDRFSRNSNPNLNKPPRVTSPK
SGYYDPNYLSTDSDKDTFLKEIIKLFKRINSREIGEELIYRLSTDIPFPGNNNTPINTFDFDVDFNSV
DVKTRQGNNWVKTGSINPSVIITGPRENIIDPETSTFKLTNNTFAAQEGFGALSIISISPRFMLTYSN
ATNDVGEGRFSKSEFCMDPILILMHELNHAMHNLYGIAIPNDQTISSVTSNIFYSQYNVKLEYAEIY
AFGGPTIDLIPKSARKYFEEKALDYYRSIAKRLNSITTANPSSFNKYIGEYKQKLIRKYRFVVESSG
EVTVNRNKFVELYNELTQIFTEFNYAKIYNVQNRKIYLSNVYTPVTANILDDNVYDIQNGFNIPKSN
LNVLFMGQNLSRNPALRKVNPENMLYLFTKFCVDGIITSKTKSLIEGRYADAIFTNRYRKVLGQLS
ARKLLQDIMSRLAGGGGSGGGGSGGGGSALVLQCRELLVKNTDLPFIGDISDVKTDIFLRKDINE
ETEVIYYPDNVSVDQVILSKNTSEHGQLDLLYPSIDSESEILPGENQVFYDNRTQNVDYLNSYYYL
ESQKLSDNVEDFTFTRSIEEALDNSAKVYTYFPTLANKVNAGVQGGLFLMWANDVVEDFTTNILR
KDTLDKISDVSAIIPYIGPALNISNSVRRGNFTEAFAVTGVTILLEAFPEFTIPALGAFVIYSKVQERN
EIIKTIDNCLEQRIKRWKDSYEWMMGTWLSRIITQFNNISYQMYDSLNYQAGAIKAKIDLEYKKYS
GSDKENIKSQVENLKNSLDVKISEAMNNINKFIRECSVTYLFKNMLPKVIDELNEFDRNTKAKLINLI
DSHNIILVGEVDKLKAKVNNSFQNTIPFNIFSYTNNSLLKDIINEYFN
SEQ ID99 Protein sequence LHC CP Human GHRH1-29 Ala substituted at position 8, Arg
substituted at position 9 fusion
PITINNFNYSDPVDNKNILYLDTHLNTLANEPEKAFRITGNIWVIPDRFSRNSNPNLNKPPRVTSPK
SGYYDPNYLSTDSDKDTFLKEIIKLFKRINSREIGEELIYRLSTDIPFPGNNNTPINTFDFDVDFNSV
DVKTRQGNNWVKTGSINPSVIITGPRENIIDPETSTFKLTNNTFAAQEGFGALSIISISPRFMLTYSN
ATNDVGEGRFSKSEFCMDPILILMHELNHAMHNLYGIAIPNDQTISSVTSNIFYSQYNVKLEYAEIY
AFGGPTIDLIPKSARKYFEEKALDYYRSIAKRLNSITTANPSSFNKYIGEYKQKLIRKYRFVVESSG
EVTVNRNKFVELYNELTQIFTEFNYAKIYNVQNRKIYLSNVYTPVTANILDDNVYDIQNGFNIPKSN
LNVLFMGQNLSRNPALRKVNPENMLYLFTKFCVDGIITSKTKSLIEGRYADAIFTARYRKVLGQLS
ARKLLQDIMSRLAGGGGSGGGGSGGGGSALVLQCRELLVKNTDLPFIGDISDVKTDIFLRKDINE
ETEVIYYPDNVSVDQVILSKNTSEHGQLDLLYPSIDSESEILPGENQVFYDNRTQNVDYLNSYYYL
ESQKLSDNVEDFTFTRSIEEALDNSAKVYTYFPTLANKVNAGVQGGLFLMWANDVVEDFTTNILR
KDTLDKISDVSAIIPYIGPALNISNSVRRGNFTEAFAVTGVTILLEAFPEFTIPALGAFVIYSKVQERN
EIIKTIDNCLEQRIKRWKDSYEWMMGTWLSRIITQFNNISYQMYDSLNYQAGAIKAKIDLEYKKYS
GSDKENIKSQVENLKNSLDVKISEAMNNINKFIRECSVTYLFKNMLPKVIDELNEFDRNTKAKLINLI
DSHNIILVGEVDKLKAKVNNSFQNTIPFNIFSYTNNSLLKDIINEYFN
SEQ ID100 Protein sequence LHC CP Human GHRH1-40 Arg substituted at position 9
fusion
PITINNFNYSDPVDNKNILYLDTHLNTLANEPEKAFRITGNIWVIPDRFSRNSNPNLNKPPRVTSPK
SGYYDPNYLSTDSDKDTFLKEIIKLFKRINSREIGEELIYRLSTDIPFPGNNNTPINTFDFDVDFNSV
DVKTRQGNNWVKTGSINPSVIITGPRENIIDPETSTFKLTNNTFAAQEGFGALSIISISPRFMLTYSN
ATNDVGEGRFSKSEFCMDPILILMHELNHAMHNLYGIAIPNDQTISSVTSNIFYSQYNVKLEYAEIY
AFGGPTIDLIPKSARKYFEEKALDYYRSIAKRLNSITTANPSSFNKYIGEYKQKLIRKYRFVVESSG
EVTVNRNKFVELYNELTQIFTEFNYAKIYNVQNRKIYLSNVYTPVTANILDDNVYDIQNGFNIPKSN
LNVLFMGQNLSRNPALRKVNPENMLYLFTKFCVDGIITSKTKSLIEGRYADAIFTNRYRKVLGQLS
ARKLLQDIMSRQQGESNQERGALAGGGGSGGGGSGGGGSALVLQCRELLVKNTDLPFIGDISD
VKTDIFLRKDINEETEVIYYPDNVSVDQVILSKNTSEHGQLDLLYPSIDSESEILPGENQVFYDNRT
QNVDYLNSYYYLESQKLSDNVEDFTFTRSIEEALDNSAKVYTYFPTLANKVNAGVQGGLFLMWA
NDVVEDFTTNILRKDTLDKISDVSAIIPYIGPALNISNSVRRGNFTEAFAVTGVTILLEAFPEFTIPAL
GAFVIYSKVQERNEIIKTIDNCLEQRIKRWKDSYEWMMGTWLSRIITQFNNISYQMYDSLNYQAG
AIKAKIDLEYKKYSGSDKENIKSQVENLKNSLDVKISEAMNNINKFIRECSVTYLFKNMLPKVIDELN
EFDRNTKAKLINLIDSHNIILVGEVDKLKAKVNNSFQNTIPFNIFSYTNNSLLKDIINEYFN
SEQ ID101 Protein sequence LHC CP Human GHRH1-44 Arg substituted at position 9
fusion
PITINNFNYSDPVDNKNILYLDTHLNTLANEPEKAFRITGNIWVIPDRFSRNSNPNLNKPPRVTSPK
SGYYDPNYLSTDSDKDTFLKEIIKLFKRINSREIGEELIYRLSTDIPFPGNNNTPINTFDFDVDFNSV
DVKTRQGNNWVKTGSINPSVIITGPRENIIDPETSTFKLTNNTFAAQEGFGALSIISISPRFMLTYSN
ATNDVGEGRFSKSEFCMDPILILMHELNHAMHNLYGIAIPNDQTISSVTSNIFYSQYNVKLEYAEIY
AFGGPTIDLIPKSARKYFEEKALDYYRSIAKRLNSITTANPSSFNKYIGEYKQKLIRKYRFVVESSG
EVTVNRNKFVELYNELTQIFTEFNYAKIYNVQNRKIYLSNVYTPVTANILDDNVYDIQNGFNIPKSN
LNVLFMGQNLSRNPALRKVNPENMLYLFTKFCVDGIITSKTKSLIEGRYADAIFTNRYRKVLGQLS
ARKLLQDIMSRQQGESNQERGARARLLAGGGGSGGGGSGGGGSALVLQCRELLVKNTDLPFIG
DISDVKTDIFLRKDINEETEVIYYPDNVSVDQVILSKNTSEHGQLDLLYPSIDSESEILPGENQVFYD
NRTQNVDYLNSYYYLESQKLSDNVEDFTFTRSIEEALDNSAKVYTYFPTLANKVNAGVQGGLFL
MWANDVVEDFTTNILRKDTLDKISDVSAIIPYIGPALNISNSVRRGNFTEAFAVTGVTILLEAFPEFTI
PALGAFVIYSKVQERNEIIKTIDNCLEQRIKRWKDSYEWMMGTWLSRIITQFNNISYQMYDSLNYQ
AGAIKAKIDLEYKKYSGSDKENIKSQVENLKNSLDVKISEAMNNINKFIRECSVTYLFKNMLPKVID
ELNEFDRNTKAKLINLIDSHNIILVGEVDKLKAKVNNSFQNTIPFNIFSYTNNSLLKDIINEYFN
SEQ ID102 Protein sequence LHC CP Human GHRH1-29 Arg substituted at position
14, 15, 16 and 17 fusion
PITINNFNYSDPVDNKNILYLDTHLNTLANEPEKAFRITGNIWVIPDRFSRNSNPNLNKPPRVTSPK
SGYYDPNYLSTDSDKDTFLKEIIKLFKRINSREIGEELIYRLSTDIPFPGNNNTPINTFDFDVDFNSV
DVKTRQGNNWVKTGSINPSVIITGPRENIIDPETSTFKLTNNTFAAQEGFGALSIISISPRFMLTYSN
ATNDVGEGRFSKSEFCMDPILILMHELNHAMHNLYGIAIPNDQTISSVTSNIFYSQYNVKLEYAEIY
AFGGPTIDLIPKSARKYFEEKALDYYRSIAKRLNSITTANPSSFNKYIGEYKQKLIRKYRFVVESSG
EVTVNRNKFVELYNELTQIFTEFNYAKIYNVQNRKIYLSNVYTPVTANILDDNVYDIQNGFNIPKSN
LNVLFMGQNLSRNPALRKVNPENMLYLFTKFCVDGIITSKTKSLIEGRYADAIFTNSYRKVRRRRS
ARKLLQDIMSRLAGGGGSGGGGSGGGGSALVLQCRELLVKNTDLPFIGDISDVKTDIFLRKDINE
ETEVIYYPDNVSVDQVILSKNTSEHGQLDLLYPSIDSESEILPGENQVFYDNRTQNVDYLNSYYYL
ESQKLSDNVEDFTFTRSIEEALDNSAKVYTYFPTLANKVNAGVQGGLFLMWANDVVEDFTTNILR
KDTLDKISDVSAIIPYIGPALNISNSVRRGNFTEAFAVTGVTILLEAFPEFTIPALGAFVIYSKVQERN
EIIKTIDNCLEQRIKRWKDSYEWMMGTWLSRIITQFNNISYQMYDSLNYQAGAIKAKIDLEYKKYS
GSDKENIKSQVENLKNSLDVKISEAMNNINKFIRECSVTYLFKNMLPKVIDELNEFDRNTKAKLINLI
DSHNIILVGEVDKLKAKVNNSFQNTIPFNIFSYTNNSLLKDIINEYFN
SEQ ID103 Protein sequence LHC CP Human GHRH1-40 Ala substituted at position 8
fusion
PITINNFNYSDPVDNKNILYLDTHLNTLANEPEKAFRITGNIWVIPDRFSRNSNPNLNKPPRVTSPK
SGYYDPNYLSTDSDKDTFLKEIIKLFKRINSREIGEELIYRLSTDIPFPGNNNTPINTFDFDVDFNSV
DVKTRQGNNWVKTGSINPSVIITGPRENIIDPETSTFKLTNNTFAAQEGFGALSIISISPRFMLTYSN
ATNDVGEGRFSKSEFCMDPILILMHELNHAMHNLYGIAIPNDQTISSVTSNIFYSQYNVKLEYAEIY
AFGGPTIDLIPKSARKYFEEKALDYYRSIAKRLNSITTANPSSFNKYIGEYKQKLIRKYRFVVESSG
EVTVNRNKFVELYNELTQIFTEFNYAKIYNVQNRKIYLSNVYTPVTANILDDNVYDIQNGFNIPKSN
LNVLFMGQNLSRNPALRKVNPENMLYLFTKFCVDGIITSKTKSLIEGRYADAIFTASYRKVLGQLS
ARKLLQDIMSRQQGESNQERGALAGGGGSGGGGSGGGGSALVLQCRELLVKNTDLPFIGDISD
VKTDIFLRKDINEETEVIYYPDNVSVDQVILSKNTSEHGQLDLLYPSIDSESEILPGENQVFYDNRT
QNVDYLNSYYYLESQKLSDNVEDFTFTRSIEEALDNSAKVYTYFPTLANKVNAGVQGGLFLMWA
NDVVEDFTTNILRKDTLDKISDVSAIIPYIGPALNISNSVRRGNFTEAFAVTGVTILLEAFPEFTIPAL
GAFVIYSKVQERNEIIKTIDNCLEQRIKRWKDSYEWMMGTWLSRIITQFNNISYQMYDSLNYQAG
AIKAKIDLEYKKYSGSDKENIKSQVENLKNSLDVKISEAMNNINKFIRECSVTYLFKNMLPKVIDELN
EFDRNTKAKLINLIDSHNIILVGEVDKLKAKVNNSFQNTIPFNIFSYTNNSLLKDIINEYFN
SEQ ID104 Protein sequence of LHD CP qGHRH fusion
MTWPVKDFNYSDPVNDNDILYLRIPQNKLITTPVKAFMITQNIWVIPERFSSDTNPSLSKPPRPTS
KYQSYYDPSYLSTDEQKDTFLKGIIKLFKRINERDIGKKLINYLVVGSPFMGDSSTPEDTFDFTRHT
TNIAVEKFENGSWKVTNIITPSVLIFGPLPNILDYTASLTLQGQQSNPSFEGFGTLSILKVAPEFLLT
FSDVTSNQSSAVLGKSIFCMDPVIALMHELTHSLHQLYGINIPSDKRIRPQVSEGFFSQDGPNVQF
EELYTFGGLDVEIIPQIERSQLREKALGHYKDIAKRLNNINKTIPSSWISNIDKYKKIFSEKYNFDKD
NTGNFVVNIDKFNSLYSDLTNVMSEVVYSSQYNVKNRTHYFSRHYLPVFANILDDNIYTIRDGFNL
TNKGFNIENSGQNIERNPALQKLSSESVVDLFTKVCVDGIITSKTKSLIEGRHVDAIFTQSYRKVLA
QLSARKLLQDILNRQQGERNQEQGALAGGGGSGGGGSGGGGSALVLQCIKVKNNRLPYVADK
DSISQEIFENKIITDETNVQNYSDKFSLDESILDGQVPINPEIVDPLLPNVNMEPLNLPGEEIVFYDDI
TKYVDYLNSYYYLESQKLSNNVENITLTTSVEEALGYSNKIYTFLPSLAEKVNKGVQAGLFLNWAN
EVVEDFTTNIMKKDTLDKISDVSVIIPYIGPALNIGNSALRGNFNQAFATAGVAFLLEGFPEFTIPAL
GVFTFYSSIQEREKIIKTIENCLEQRVKRWKDSYQWMVSNWLSRITTQFNHINYQMYDSLSYQAD
AIKAKIDLEYKKYSGSDKENIKSQVENLKNSLDVKISEAMNNINKFIRECSVTYLFKNMLPKVIDELN
KFDLRTKTELINLIDSHNIILVGEVDRLKAKVNESFENTMPFNIFSYTNNSLLKDIINEYF
SEQ ID105 DNA sequence of the LHD CP qGHRH fusion
ATGACCTGGCCGGTCAAAGACTTCAACTATAGCGATCCGGTCAACGACAACGATATCCTGTA
TCTGCGCATTCCGCAGAACAAACTGATTACCACGCCGGTGAAAGCCTTCATGATTACTCAGA
ACATCTGGGTGATCCCGGAACGTTTTTCTTCCGATACTAACCCGTCTCTGTCTAAACCGCCG
CGTCCGACCTCCAAATATCAGTCTTACTACGATCCGTCTTACCTGTCCACCGACGAACAGAA
AGACACGTTTCTGAAAGGCATCATCAAACTGTTCAAACGTATCAACGAGCGTGACATTGGCA
AAAAACTGATCAACTACCTGGTAGTGGGTTCTCCGTTCATGGGTGATTCTAGCACTCCGGAA
GATACCTTCGACTTCACTCGCCACACCACTAACATCGCAGTGGAAAAATTCGAGAACGGTAG
CTGGAAAGTCACCAACATCATCACTCCGTCTGTTCTGATCTTTGGTCCGCTGCCGAACATTC
TGGACTATACTGCATCTCTGACCCTGCAGGGTCAGCAGAGCAACCCGTCCTTCGAAGGCTT
CGGTACCCTGTCTATCCTGAAAGTTGCACCGGAATTCCTGCTGACTTTCAGCGACGTTACCT
CTAACCAGTCCTCTGCAGTACTGGGTAAAAGCATTTTCTGCATGGACCCGGTTATTGCTCTG
ATGCATGAACTGACCCACAGCCTGCACCAGCTGTATGGTATCAACATCCCGTCTGATAAACG
CATTCGTCCGCAGGTCTCTGAAGGTTTCTTTTCTCAGGATGGCCCGAACGTTCAGTTCGAGG
AACTGTATACTTTCGGTGGCCTGGATGTTGAAATCATTCCGCAGATCGAACGTTCTCAGCTG
CGCGAAAAAGCGCTGGGTCACTACAAAGATATCGCAAAACGCCTGAACAACATCAACAAAAC
GATTCCGTCCAGCTGGATCTCCAACATCGATAAATACAAAAAAATCTTCTCCGAGAAATACAA
CTTCGATAAAGACAACACTGGCAACTTCGTGGTCAACATCGACAAATTCAACTCTCTGTACA
GCGACCTGACCAACGTTATGTCCGAAGTCGTTTACTCTTCCCAGTACAACGTCAAAAACCGT
ACCCACTATTTTTCTCGCCACTATCTGCCGGTATTCGCGAACATTCTGGACGACAACATTTAC
ACGATCCGCGATGGCTTCAACCTGACCAACAAAGGCTTTAACATCGAGAACAGCGGTCAGA
ACATTGAACGTAACCCGGCACTGCAGAAACTGTCCTCTGAATCTGTGGTTGATCTGTTTACC
AAAGTATGCGTAGACGGCATTATCACCTCCAAAACCAAATCCCTGATTGAAGGTCGCCACGT
GGATGCGATCTTCACTCAGTCTTACCGTAAAGTTCTGGCGCAGCTGAGCGCTCGTAAACTGC
TGCAGGATATCCTGAACCGTCAGCAGGGTGAACGTAACCAGGAACAGGGCGCTCTGGCTG
GTGGCGGTGGCTCTGGTGGCGGCGGTTCTGGCGGCGGTGGTTCTGCCCTGGTACTGCAGT
GTATCAAAGTGAAAAACAACCGTCTGCCGTACGTTGCCGATAAAGATTCTATCTCTCAGGAG
ATCTTCGAGAACAAAATTATCACCGACGAGACCAACGTTCAGAACTACAGCGACAAATTTAG
CCTGGATGAATCCATCCTGGATGGTCAGGTGCCGATCAACCCGGAAATCGTAGATCCGCTG
CTGCCGAACGTTAACATGGAACCGCTGAACCTGCCGGGTGAGGAAATCGTCTTTTACGATG
ACATCACCAAATACGTGGACTATCTGAACTCCTATTACTACCTGGAATCCCAGAAACTGTCCA
ACAACGTCGAAAACATTACTCTGACTACGTCTGTTGAGGAAGCCCTGGGCTACTCTAACAAA
ATCTACACGTTTCTGCCGTCCCTGGCGGAAAAAGTAAACAAAGGTGTTCAGGCAGGCCTGTT
TCTGAACTGGGCTAACGAGGTTGTGGAAGATTTCACCACCAACATTATGAAAAAAGACACCC
TGGACAAAATCTCTGACGTATCTGTGATCATTCCGTACATCGGTCCGGCTCTGAACATTGGT
AACTCTGCTCTGCGTGGCAACTTCAACCAGGCGTTTGCTACTGCAGGCGTAGCTTTCCTGCT
GGAAGGTTTTCCGGAGTTTACCATTCCGGCCCTGGGTGTTTTCACCTTCTATAGCTCCATTC
AGGAGCGTGAGAAAATCATTAAAACCATCGAGAACTGTCTGGAACAGCGCGTGAAACGTTG
GAAAGATTCTTATCAGTGGATGGTTTCTAACTGGCTGTCTCGTATCACCACGCAGTTCAACC
ATATTAACTACCAGATGTACGATAGCCTGTCTTACCAGGCGGACGCTATCAAAGCGAAAATC
GACCTGGAGTATAAAAAATACTCTGGCAGCGACAAAGAAAACATCAAAAGCCAGGTGGAAAA
CCTGAAAAACTCCCTGGACGTGAAAATCTCCGAAGCGATGAACAACATCAACAAATTTATCC
GTGAGTGCAGCGTCACGTACCTGTTCAAAAACATGCTGCCGAAAGTGATCGACGAGCTGAA
CAAATTTGACCTGCGCACCAAAACCGAGCTGATCAACCTGATTGATTCCCATAACATCATCCT
GGTAGGTGAAGTTGACCGTCTGAAAGCGAAAGTTAACGAATCTTTCGAAAACACTATGCCGT
TCAACATTTTTAGCTATACCAACAACTCTCTGCTGAAAGACATTATCAACGAATACTTC

What is claimed is:

1. A polypeptide comprising an amino acid sequence, wherein said amino acid sequence is selected from the group consisting of SEQ ID NOs: 88, 89, 90, 91, 92, 93, 94, 95, 96, 97, 98, 99, 100, 100, 101, 102, 103 and 104.

2. A method for activating a polypeptide comprising:
(i) providing a polypeptide according to claim 1, said polypeptide comprising an amino acid sequence having an N-terminus and a C-terminus, wherein said amino acid sequence comprises in an N-terminus to C-terminus direction:
a) a clostridial neurotoxin L-chain amino acid sequence
b) a site for cleavage by a proteolytic enzyme;
c) a GHRH amino acid sequence; and
d) a clostridial neurotoxin H_{N} translocation domain amino acid sequence;
(ii) contacting said polypeptide with a proteolytic enzyme that cleaves said cleavage site;
(iii) cleaving said polypeptide at said cleavage site, and thereby providing a di-chain polypeptide, wherein the clostridial neurotoxin L-chain amino acid sequence and the clostridial neurotoxin H_{N} translocation domain amino acid sequence are linked together by disulphide bond.

3. A method according to claim 2, wherein the proteolytic enzyme is a factor Xa proteolytic enzyme.

4. A method according to claim 3, wherein the cleavage site is selected from the group consisting of IEGR and IDGR.

5. A polypeptide, obtained by the method of claim 2, wherein the polypeptide is a di-chain polypeptide, and wherein:
a. the first chain comprises the clostridial neurotoxin L-chain amino acid sequence;
b. the second chain comprises the GHRH amino acid sequence and the clostridial neurotoxin H_{N} translocation domain amino acid sequence; and
the first and second chains are disulphide linked together.

6. A method for suppressing a cancer, said method comprising administering to a patient a therapeutically effective amount of a polypeptide, wherein said polypeptide is a polypeptide according to claim 1.

7. A method according to claim 6, wherein said method comprises suppression of growth hormone secretion from a growth hormone secreting cell.

8. A method according to claim 7, wherein the growth hormone secreting cell is a pituitary cell.

9. A method for suppressing a cancer, said method comprising administering to a patient a therapeutically effective amount of a polypeptide, wherein said polypeptide is a polypeptide according to claim 5.

10. A method according to claim 9, wherein said method comprises suppression of growth hormone secretion from a growth hormone secreting cell.

11. A method according to claim 10, wherein the growth hormone secreting cell is a pituitary cell.

12. A nucleic acid sequence encoding a polypeptide according to claim 1.

13. A nucleic acid sequence according to claim 12, wherein said sequence comprises the nucleic acid sequence of SEQ ID NO: 105

The application's sequence listing, which the Patent Office published only in electronic form, follows.

SEQUENCE LISTING (105 sequences)

SEQ ID NO: 1 - DNA, 2619 bp, Artificial Sequence
  source: /note="Description of Artificial Sequence: Synthetic polynucleotide"
ggatccatggagttcgttaacaaacagttcaactataaagacccagttaacggtgttgacattgcttacatcaaaatcccgaacgctggccagatgcagccggtaaaggcattcaaaatccacaacaaaatctgggttatcccggaacgtgatacctttactaacccggaagaaggtgacctgaacccgccaccggaagcgaaacaggtgccggtatcttactatgactccacctacctgtctaccgataacgaaaaggacaactacctgaaaggtgttactaaactgttcgagcgtatttactccaccgacctgggccgtatgctgctgactagcatcgttcgcggtatcccgttctggggcggttctaccatcgataccgaactgaaagtaatcgacactaactgcatcaacgttattcagccggacggttcctatcgttccgaagaactgaacctggtgatcatcggcccgtctgctgatatcatccagttcgagtgtaagagctttggtcacgaagttctgaacctcacccgtaacggctacggttccactcagtacatccgtttctctccggacttcaccttcggttttgaagaatccctggaagtagacacgaacccactgctgggcgctggtaaattcgcaactgatcctgcggttaccctggctcacgaactgattcatgcaggccaccgcctgtacggtatcgccatcaatccgaaccgtgtcttcaaagttaacaccaacgcgtattacgagatgtccggtctggaagttagcttcgaagaactgcgtacttttggcggtcacgacgctaaattcatcgactctctgcaagaaaacgagttccgtctgtactactataacaagttcaaagatatcgcatccaccctgaacaaagcgaaatccatcgtgggtaccactgcttctctccagtacatgaagaacgtttttaaagaaaaatacctgctcagcgaagacacctccggcaaattctctgtagacaagttgaaattcgataaactttacaaaatgctgactgaaatttacaccgaagacaacttcgttaagttctttaaagttctgaaccgcaaaacctatctgaacttcgacaaggcagtattcaaaatcaacatcgtgccgaaagttaactacactatctacgatggtttcaacctgcgtaacaccaacctggctgctaattttaacggccagaacacggaaatcaacaacatgaacttcacaaaactgaaaaacttcactggtctgttcgagttttacaagctgctgtgcgtcgacggcatcattacctccaaaactaaatctgacgatgacgataaaaacaaagcgctgaacctgcagtgtatcaaggttaacaactgggatttattcttcagcccgagtgaagacaacttcaccaacgacctgaacaaaggtgaagaaatcacctcagatactaacatcgaagcagccgaagaaaacatctcgctggacctgatccagcagtactacctgacctttaatttcgacaacgagccggaaaacatttctatcgaaaacctgagctctgatatcatcggccagctggaactgatgccgaacatcgaacgtttcccaaacggtaaaaagtacgagctggacaaatataccatgttccactacctgcgcgcgcaggaatttgaacacggcaaatcccgtatcgcactgactaactccgttaacgaagctctgctcaacccgtcccgtgtatacaccttcttctctagcgactacgtgaaaaaggtcaacaaagcgactgaagctgcaatgttcttgggttgggttgaacagcttgtttatgattttaccgacgagacgtccgaagtatctactaccgacaaaattgcggatatcactatcatcatcccgtacatcggtccggctctgaacattggcaacatgctgtacaaagacgacttcgttggcgcactgatcttctccggtgcggtgatcctgctggagttcatcccggaaatcgccatcccggtactgggcacctttgctctggtttcttacattgcaaacaaggttctgactgtacaaaccatcgacaacgcgctgagcaaacgtaacgaaaaatgggatgaagtttacaaatatatcgtgaccaactggctggctaaggttaatactcagatcgacctcatccgcaaaaaaatgaaagaagcactggaaaaccaggcggaagctaccaaggcaatcattaactaccagtacaaccagtacaccgaggaagaaaaaaacaacatcaacttcaacatcgacgatctgtcctctaaactgaacgaatccatcaacaaagctatgatcaacatcaacaagttcctgaaccagtgctctgtaagctatctgatgaactccatgatcccgtacggtgttaaacgtctggaggacttcgatgcgtctctgaaagacgccctgctgaaatacatttacgacaaccgtggcactctgatcggtcaggttgatcgtctgaaggacaaagtgaacaataccttatcgaccgacatcccttttcagctcagtaaatatgtcgataaccaacgccttttgtccactctagaataatgaaagctt

SEQ ID NO: 2 - DNA, 2634 bp, Artificial Sequence
  source: /note="Description of Artificial Sequence: Synthetic polynucleotide"
ggatccatgccggttaccatcaacaacttcaactacaacgacccgatcgacaacaacaacatcattatgatggaaccgccgttcgcacgtggtaccggacgttactacaaggcttttaagatcaccgaccgtatctggatcatcccggaacgttacaccttcggttacaaacctgaggacttcaacaagagtagcgggattttcaatcgtgacgtctgcgagtactatgatccagattatctgaataccaacgataagaagaacatattccttcagactatgattaaactcttcaaccgtatcaaaagcaaaccgctcggtgaaaaactcctcgaaatgattatcaacggtatcccgtacctcggtgaccgtcgtgtcccgcttgaagagttcaacaccaacatcgcaagcgtcaccgtcaacaaactcatcagcaacccaggtgaagtcgaacgtaaaaaaggtatcttcgcaaacctcatcatcttcggtccgggtccggtcctcaacgaaaacgaaaccatcgacatcggtatccagaaccacttcgcaagccgtgaaggtttcggtggtatcatgcagatgaaattctgcccggaatacgtcagtgtcttcaacaacgtccaggaaaacaaaggtgcaagcatcttcaaccgtcgtggttacttcagcgacccggcactcatcctcatgcatgaactcatccacgtcctccacggtctctacggtatcaaagttgacgacctcccgatcgtcccgaacgagaagaaattcttcatgcagagcaccgacgcaatccaggctgaggaactctacaccttcggtggccaagacccaagtatcataaccccgtccaccgacaaaagcatctacgacaaagtcctccagaacttcaggggtatcgtggacagactcaacaaagtcctcgtctgcatcagcgacccgaacatcaatatcaacatatacaagaacaagttcaaagacaagtacaaattcgtcgaggacagcgaaggcaaatacagcatcgacgtagaaagtttcgacaagctctacaaaagcctcatgttcggtttcaccgaaaccaacatcgccgagaactacaagatcaagacaagggcaagttacttcagcgacagcctcccgcctgtcaaaatcaagaacctcttagacaacgagatttacacaattgaagagggcttcaacatcagtgacaaagacatggagaaggaatacagaggtcagaacaaggctatcaacaaacaggcatacgaggagatcagcaaagaacacctcgcagtctacaagatccagatgtgcgtcgacgaagaaaagctgtacgacgacgacgacaaagaccgttggggttcttcgctgcagtgcatcgacgttgacaacgaagacctgttcttcatcgctgacaaaaacagcttcagtgacgacctgagcaaaaacgaacgtatcgaatacaacacccagagcaactacatcgaaaacgacttcccgatcaacgaactgatcctggacaccgacctgataagtaaaatcgaactgccgagcgaaaacaccgaaagtctgaccgacttcaacgttgacgttccggtttacgaaaaacagccggctatcaagaaaatcttcaccgacgaaaacaccatcttccagtacctgtacagccagaccttcccgctggacatccgtgacatcagtctgaccagcagtttcgacgacgctctgctgttcagcaacaaagtttacagtttcttcagcatggactacatcaaaaccgctaacaaagttgttgaagcagggctgttcgctggttgggttaaacagatcgttaacgacttcgttatcgaagctaacaaaagcaacactatggacgcaatcgctgacatcagtctgatcgttccgtacatcggtctggctctgaacgttggtaacgaaaccgctaaaggtaactttgaaaacgctttcgagatcgctggtgcaagcatcctgctggagttcatcccggaactgctgatcccggttgttggtgctttcctgctggaaagttacatcgacaacaaaaacaagatcatcaaaaccatcgacaacgctctgaccaaacgtaacgaaaaatggagtgatatgtacggtctgatcgttgctcagtggctgagcaccgtcaacacccagttctacaccatcaaagaaggtatgtacaaagctctgaactaccaggctcaggctctggaagagatcatcaaataccgttacaacatctacagtgagaaggaaaagagtaacatcaacatcgacttcaacgacatcaacagcaaactgaacgaaggtatcaaccaggctatcgacaacatcaacaacttcatcaacggttgcagtgttagctacctgatgaagaagatgatcccgctggctgttgaaaaactgctggacttcgacaacaccctgaaaaagaacctgctgaactacatcgacgaaaacaagctgtacctgatcggtagtgctgaatacgaaaaaagtaaagtgaacaaatacctgaagaccatcatgccgttcgacctgagtatctacaccaacgacaccatcctgatcgaaatgttcaacaaatacaactctctagaataatgaaagctt

SEQ ID NO: 3 - DNA, 2620 bp, Artificial Sequence
  source: /note="Description of Artificial Sequence: Synthetic polynucleotide"
ggatccatgccgatcaccatcaacaacttcaactacagcgatccggtggataacaaaaacatcctgtacctggatacccatctgaataccctggcgaacgaaccggaaaaagcgtttcgtatcaccggcaacatttgggttattccggatcgttttagccgtaacagcaacccgaatctgaataaaccgccgcgtgttaccagcccgaaaagcggttattacgatccgaactatctgagcaccgatagcgataaagataccttcctgaaagaaatcatcaaactgttcaaacgcatcaacagccgtgaaattggcgaagaactgatctatcgcctgagcaccgatattccgtttccgggcaacaacaacaccccgatcaacacctttgatttcgatgtggatttcaacagcgttgatgttaaaacccgccagggtaacaattgggtgaaaaccggcagcattaacccaagcgtgattattaccggtccgcgcgaaaacattattgatccggaaaccagcacctttaaactgaccaacaacacctttgcggcgcaggaaggttttggcgcgctgagcattattagcattagcccgcgctttatgctgacctatagcaacgcgaccaacgatgttggtgaaggccgtttcagcaaaagcgaattttgcatggacccgatcctgatcctgatgcatgaactgaaccatgcgatgcataacctgtatggcatcgcgattccgaacgatcagaccattagcagcgtgaccagcaacatcttttacagccagtacaacgtgaaactggaatatgcggaaatctatgcgtttggcggtccgaccattgatctgattccgaaaagcgcgcgcaaatacttcgaagaaaaagcgctggattactatcgcagcattgcgaaacgtctgaacagcattaccaccgcgaatccgagcagcttcaacaaatatatcggcgaatataaacagaaactgatccgcaaatatcgctttgtggtggaaagcagcggcgaagttaccgttaaccgcaataaattcgtggaactgtacaacgaactgacccagatcttcaccgaatttaactatgcgaaaatctataacgtgcagaaccgtaaaatctacctgagcaacgtgtataccccggtgaccgcgaatattctggatgataacgtgtacgatatccagaacggctttaacatcccgaaaagcaacctgaacgttctgtttatgggccagaacctgagccgtaatccggcgctgcgtaaagtgaacccggaaaacatgctgtacctgttcaccaaattttgcgtcgacgcgattgatggtcgtagcctgtacaacaaaaccctgcagtgtcgtgaactgctggtgaaaaacaccgatctgccgtttattggcgatatcagcgatgtgaaaaccgatatcttcctgcgcaaagatatcaacgaagaaaccgaagtgatctactacccggataacgtgagcgttgatcaggtgatcctgagcaaaaacaccagcgaacatggtcagctggatctgctgtatccgagcattgatagcgaaagcgaaattctgccgggcgaaaaccaggtgttttacgataaccgtacccagaacgtggattacctgaacagctattactacctggaaagccagaaactgagcgataacgtggaagattttacctttacccgcagcattgaagaagcgctggataacagcgcgaaagtttacacctattttccgaccctggcgaacaaagttaatgcgggtgttcagggcggtctgtttctgatgtgggcgaacgatgtggtggaagatttcaccaccaacatcctgcgtaaagataccctggataaaatcagcgatgttagcgcgattattccgtatattggtccggcgctgaacattagcaatagcgtgcgtcgtggcaattttaccgaagcgtttgcggttaccggtgtgaccattctgctggaagcgtttccggaatttaccattccggcgctgggtgcgtttgtgatctatagcaaagtgcaggaacgcaacgaaatcatcaaaaccatcgataactgcctggaacagcgtattaaacgctggaaagatagctatgaatggatgatgggcacctggctgagccgtattatcacccagttcaacaacatcagctaccagatgtacgatagcctgaactatcaggcgggtgcgattaaagcgaaaatcgatctggaatacaaaaaatacagcggcagcgataaagaaaacatcaaaagccaggttgaaaacctgaaaaacagcctggatgtgaaaattagcgaagcgatgaataacatcaacaaattcatccgcgaatgcagcgtgacctacctgttcaaaaacatgctgccgaaagtgatcgatgaactgaacgaatttgatcgcaacaccaaagcgaaactgatcaacctgatcgatagccacaacattattctggtgggcgaagtggataaactgaaagcgaaagttaacaacagcttccagaacaccatcccgtttaacatcttcagctataccaacaacagcctgctgaaagatatcatcaacgaatacttcaatctagactaataagctt

SEQ ID NO: 4 - DNA, 2638 bp, Artificial Sequence
  source: /note="Description of Artificial Sequence: Synthetic polynucleotide"
ggatccatgacgtggccagttaaggatttcaactactcagatcctgtaaatgacaacgatattctgtaccttcgcattccacaaaataaactgatcaccacaccagtcaaagcattcatgattactcaaaacatttgggtcattccagaacgcttttctagtgacacaaatccgagtttatctaaacctccgcgtccgacgtccaaatatcagagctattacgatccctcatatctcagtacggacgaacaaaaagatactttccttaaaggtatcattaaactgtttaagcgtattaatgagcgcgatatcgggaaaaagttgattaattatcttgttgtgggttccccgttcatgggcgatagctctacccccgaagacacttttgattttacccgtcatacgacaaacatcgcggtagagaagtttgagaacggatcgtggaaagtcacaaacatcattacacctagcgtcttaatttttggtccgctgccaaacatcttagattatacagccagcctgactttgcaggggcaacagtcgaatccgagtttcgaaggttttggtaccctgagcattctgaaagttgccccggaatttctgctcactttttcagatgtcaccagcaaccagagctcagcagtattaggaaagtcaattttttgcatggacccggttattgcactgatgcacgaactgacgcactctctgcatcaactgtatgggatcaacatccccagtgacaaacgtattcgtccccaggtgtctgaaggatttttctcacaggatgggccgaacgtccagttcgaagagttgtatactttcggaggcctggacgtagagatcattccccagattgagcgcagtcagctgcgtgagaaggcattgggccattataaggatattgcaaaacgcctgaataacattaacaaaacgattccatcttcgtggatctcgaatattgataaatataagaaaatttttagcgagaaatataattttgataaagataatacaggtaactttgtggttaacattgacaaattcaactccctttacagtgatttgacgaatgtaatgagcgaagttgtgtatagttcccaatacaacgttaagaatcgtacccattacttctctcgtcactacctgccggttttcgcgaacatccttgacgataatatttacactattcgtgacggctttaacttgaccaacaagggcttcaatattgaaaattcaggccagaacattgaacgcaacccggccttgcagaaactgtcgagtgaatccgtggttgacctgtttaccaaagtctgcgtcgacaaaagcgaagagaagctgtacgatgacgatgacaaagatcgttggggatcgtccctgcagtgtattaaagtgaaaaacaatcggctgccttatgtagcagataaagatagcattagtcaggagattttcgaaaataaaattatcactgacgaaaccaatgttcagaattattcagataaattttcactggacgaaagcatcttagatggccaagttccgattaacccggaaattgttgatccgttactgccgaacgtgaatatggaaccgttaaacctccctggcgaagagatcgtattttatgatgacattacgaaatatgtggactaccttaattcttattactatttggaaagccagaaactgtccaataacgtggaaaacattactctgaccacaagcgtggaagaggctttaggctactcaaataagatttataccttcctcccgtcgctggcggaaaaagtaaataaaggtgtgcaggctggtctgttcctcaactgggcgaatgaagttgtcgaagactttaccacgaatattatgaaaaaggataccctggataaaatctccgacgtctcggttattatcccatatattggccctgcgttaaatatcggtaatagtgcgctgcgggggaattttaaccaggcctttgctaccgcgggcgtcgcgttcctcctggagggctttcctgaatttactatcccggcgctcggtgtttttacattttactcttccatccaggagcgtgagaaaattatcaaaaccatcgaaaactgcctggagcagcgggtgaaacgctggaaagattcttatcaatggatggtgtcaaactggttatctcgcatcacgacccaattcaaccatattaattaccagatgtatgatagtctgtcgtaccaagctgacgccattaaagccaaaattgatctggaatataaaaagtactctggtagcgataaggagaacatcaaaagccaggtggagaaccttaagaatagtctggatgtgaaaatctctgaagctatgaataacattaacaaattcattcgtgaatgttcggtgacgtacctgttcaagaatatgctgccaaaagttattgatgaactgaataaatttgatctgcgtaccaaaaccgaacttatcaacctcatcgactcccacaacattatccttgtgggcgaagtggatcgtctgaaggccaaagtaaacgagagctttgaaaatacgatgccgtttaatattttttcatataccaataactccttgctgaaagatatcatcaatgaatatttcaatctagaataataagctt

SEQ ID NO: 5 - DNA, 2065 bp, Artificial Sequence
  source: /note="Description of Artificial Sequence: Synthetic polynucleotide"
ggatccatggagtccaatcagccggaaaaaaatggaaccgcgactaaacccgagaattcggggaacactacgtcggaaaacggccagacggaacctgagaagaaactggaactacgaaatgtgtccgatatcgagctatactctcaaaccaatggaacctataggcagcatgtttcattggacggaatcccagaaaatacggatacatatttcgtcaaagtgaagtctagcgcattcaaggatgtatatatccccgttgcgagtattacagaagagaagcggaacggtcaaagcgtttataagattacagcaaaggccgaaaagttacaacaggagttagaaaacaaatacgttgacaatttcactttttatctcgataaaaaggctaaagaggaaaacacgaacttcacgtcatttagtaatctggtcaaagccataaatcaaaatccatctggtacataccatctcgcggcaagtctaaacgcgaatgaagtagaacttggcccggacgagcgttcatacattaaggatacctttactggcagactcataggggaaaaagacggtaagaactatgctatatacaatttgaaaaagcctttatttgagaacctgtcgggcgccaccgtcgagaaattgtcccttaaaaacgtagctataagcggaaagaatgacatcggtagtcttgcaaacgaggctactaacgggacaaagattaaacaagtgcacgtagatgggtgtgtcgacggcatcattacctccaaaactaaatctgacgatgacgataaaaacaaagcgctgaacctgcagtgcattaaaataaagaatgaggatttgacattcatcgcagaaaaaaatagcttcagcgaagagccgttccaagatgagatagtaagctacaacaccaagaacaagccgcttaattttaattactcgttagataaaatcatagttgactacaaccttcaatcgaagatcacgttaccgaatgacagaacaactcctgtcacaaaaggaattccctatgcacctgagtataagtcaaatgccgcgtcaacaatagagattcataatatagatgacaacaccatctatcaatatctgtacgctcagaaaagtccaacaactcttcagcgtataacaatgaccaatagtgtcgatgacgcattgataaattctaccaagatatactcttatttcccgagcgtcatctccaaagttaatcaaggtgctcaaggcattctatttttgcaatgggtccgagacatcatagatgacttcactaatgagtcgtctcagaaaaccacgattgataaaatatcagatgtttccaccatcgtcccctacatcggacctgcgcttaacattgtgaagcaggggtatgaggggaattttatcggagcgttagaaactacgggggttgtgctattacttgaatacataccagagataacattgcccgttatagcggccctcagtatcgcagaatcaagtacacaaaaagaaaagataatcaaaacaatcgacaacttcctagaaaagaggtacgaaaaatggatagaggtttataaactcgtgaaagcgaaatggttaggcactgttaatacgcagttccaaaagagatcctatcaaatgtatagatcactggagtaccaggtggatgccataaagaaaattatcgactatgaatataaaatatattcaggtccagataaggagcagatagctgatgaaataaacaatttaaaaaacaaacttgaagagaaggcgaataaggccatgatcaatatcaatatttttatgcgagaatcttcacgatcttttttggtaaatcagatgattaacgaagccaaaaagcagctgcttgagttcgacacacagtccaaaaacatactaatgcaatatatcaaagcaaactcaaaattcattggaattactgagctgaagaaactggaatccaaaataaataaagtattctctaccccgatcccgttctcttactctaaaaaccttgactgctgggtagataacgaagaagatattgacgttctagagtaataagctt

SEQ ID NO: 6 - DNA, 219 bp, Artificial Sequence
  source: /note="Description of Artificial Sequence: Synthetic polynucleotide"
catatgccggttggatccatccaggtcgactttaaactgcagggtgttactctagagggcggtggcggtagcggtggcggtggcagcggcggtggcggtagcgcactagtgggcagctcatttctgtctccggaacatcaacgggtgcagcagcgtaaagagagtaaaaagccgccagcgaaattacagcctcgctaatagaagcttaagggcgaattc

SEQ ID NO: 7 - DNA, 2784 bp, Artificial Sequence
  source: /note="Description of Artificial Sequence: Synthetic polynucleotide"
catatgccggttggatccatgccgatcaccatcaacaacttcaactacagcgatccggtggataacaaaaacatcctgtacctggatacccatctgaataccctggcgaacgaaccggaaaaagcgtttcgtatcaccggcaacatttgggttattccggatcgttttagccgtaacagcaacccgaatctgaataaaccgccgcgtgttaccagcccgaaaagcggttattacgatccgaactatctgagcaccgatagcgataaagataccttcctgaaagaaatcatcaaactgttcaaacgcatcaacagccgtgaaattggcgaagaactgatctatcgcctgagcaccgatattccgtttccgggcaacaacaacaccccgatcaacacctttgatttcgatgtggatttcaacagcgttgatgttaaaacccgccagggtaacaattgggtgaaaaccggcagcattaacccgagcgtgattattaccggtccgcgcgaaaacattattgatccggaaaccagcacctttaaactgaccaacaacacctttgcggcgcaggaaggttttggcgcgctgagcattattagcattagcccgcgctttatgctgacctatagcaacgcgaccaacgatgttggtgaaggccgtttcagcaaaagcgaattttgcatggacccgatcctgatcctgatgcatgaactgaaccatgcgatgcataacctgtatggcatcgcgattccgaacgatcagaccattagcagcgtgaccagcaacatcttttacagccagtacaacgtgaaactggaatatgcggaaatctatgcgtttggcggtccgaccattgatctgattccgaaaagcgcgcgcaaatacttcgaagaaaaagcgctggattactatcgcagcattgcgaaacgtctgaacagcattaccaccgcgaatccgagcagcttcaacaaatatatcggcgaatataaacagaaactgatccgcaaatatcgctttgtggtggaaagcagcggcgaagttaccgttaaccgcaataaattcgtggaactgtacaacgaactgacccagatcttcaccgaatttaactatgcgaaaatctataacgtgcagaaccgtaaaatctacctgagcaacgtgtataccccggtgaccgcgaatattctggatgataacgtgtacgatatccagaacggctttaacatcccgaaaagcaacctgaacgttctgtttatgggccagaacctgagccgtaatccggcgctgcgtaaagtgaacccggaaaacatgctgtacctgttcaccaaattttgcgtcgacgcgattgatggtcgtagcctgtacaacaaaaccctgcagtgtcgtgaactgctggtgaaaaacaccgatctgccgtttattggcgatatcagcgatgtgaaaaccgatatcttcctgcgcaaagatatcaacgaagaaaccgaagtgatctactacccggataacgtgagcgttgatcaggtgatcctgagcaaaaacaccagcgaacatggtcagctggatctgctgtatccgagcattgatagcgaaagcgaaattctgccgggcgaaaaccaggtgttttacgataaccgtacccagaacgtggattacctgaacagctattactacctggaaagccagaaactgagcgataacgtggaagattttacctttacccgcagcattgaagaagcgctggataacagcgcgaaagtttacacctattttccgaccctggcgaacaaagttaatgcgggtgttcagggcggtctgtttctgatgtgggcgaacgatgtggtggaagatttcaccaccaacatcctgcgtaaagataccctggataaaatcagcgatgttagcgcgattattccgtatattggtccggcgctgaacattagcaatagcgtgcgtcgtggcaattttaccgaagcgtttgcggttaccggtgtgaccattctgctggaagcgtttccggaatttaccattccggcgctgggtgcgtttgtgatctatagcaaagtgcaggaacgcaacgaaatcatcaaaaccatcgataactgcctggaacagcgtattaaacgctggaaagatagctatgaatggatgatgggcacctggctgagccgtattatcacccagttcaacaacatcagctaccagatgtacgatagcctgaactatcaggcgggtgcgattaaagcgaaaatcgatctggaatacaaaaaatacagcggcagcgataaagaaaacatcaaaagccaggttgaaaacctgaaaaacagcctggatgtgaaaattagcgaagcgatgaataacatcaacaaattcatccgcgaatgcagcgtgacctacctgttcaaaaacatgctgccgaaagtgatcgatgaactgaacgaatttgatcgcaacaccaaagcgaaactgatcaacctgatcgatagccacaacattattctggtgggcgaagtggataaactgaaagcgaaagttaacaacagcttccagaacaccatcccgtttaacatcttcagctataccaacaacagcctgctgaaagatatcatcaacgaatacttcaatctagagggcggtggcggtagcggtggcggtggcagcggcggtggcggtagcgcactagtgggcagctcatttctgtctccggaacatcaacgggtgcagcagcgtaaagagagtaaaaagccgccagcgaaattacagcctcgctaatagaagcttaagggcgaattc

SEQ ID NO: 8 - protein, 913 aa, Artificial Sequence
  source: /note="Description of Artificial Sequence: Synthetic polypeptide"
PITINNFNYSDPVDNKNILYLDTHLNTLANEPEKAFRITGNIWVIPDRFSRNSNPNLNKPPRVTSPKSGYYDPNYLSTDSDKDTFLKEIIKLFKRINSREIGEELIYRLSTDIPFPGNNNTPINTFDFDVDFNSVDVKTRQGNNWVKTGSINPSVIITGPRENIIDPETSTFKLTNNTFAAQEGFGALSIISISPRFMLTYSNATNDVGEGRFSKSEFCMDPILILMHELNHAMHNLYGIAIPNDQTISSVTSNIFYSQYNVKLEYAEIYAFGGPTIDLIPKSARKYFEEKALDYYRSIAKRLNSITTANPSSFNKYIGEYKQKLIRKYRFVVESSGEVTVNRNKFVELYNELTQIFTEFNYAKIYNVQNRKIYLSNVYTPVTANILDDNVYDIQNGFNIPKSNLNVLFMGQNLSRNPALRKVNPENMLYLFTKFCVDAIDGRSLYNKTLQCRELLVKNTDLPFIGDISDVKTDIFLRKDINEETEVIYYPDNVSVDQVILSKNTSEHGQLDLLYPSIDSESEILPGENQVFYDNRTQNVDYLNSYYYLESQKLSDNVEDFTFTRSIEEALDNSAKVYTYFPTLANKVNAGVQGGLFLMWANDVVEDFTTNILRKDTLDKISDVSAIIPYIGPALNISNSVRRGNFTEAFAVTGVTILLEAFPEFTIPALGAFVIYSKVQERNEIIKTIDNCLEQRIKRWKDSYEWMMGTWLSRIITQFNNISYQMYDSLNYQAGAIKAKIDLEYKKYSGSDKENIKSQVENLKNSLDVKISEAMNNINKFIRECSVTYLFKNMLPKVIDELNEFDRNTKAKLINLIDSHNIILVGEVDKLKAKVNNSFQNTIPFNIFSYTNNSLLKDIINEYFNLEGGGGSGGGGSGGGGSALVGSSFLSPEHQRVQQRKESKKPPAKLQPR

SEQ ID NO: 9 - protein, 931 aa, Artificial Sequence
  source: /note="Description of Artificial Sequence: Synthetic polypeptide"
TWPVKDFNYSDPVNDNDILYLRIPQNKLITTPVKAFMITQNIWVIPERFSSDTNPSLSKPPRPTSKYQSYYDPSYLSTDEQKDTFLKGIIKLFKRINERDIGKKLINYLVVGSPFMGDSSTPEDTFDFTRHTTNIAVEKFENGSWKVTNIITPSVLIFGPLPNILDYTASLTLQGQQSNPSFEGFGTLSILKVAPEFLLTFSDVTSNQSSAVLGKSIFCMDPVIALMHELTHSLHQLYGINIPSDKRIRPQVSEGFFSQDGPNVQFEELYTFGGLDVEIIPQIERSQLREKALGHYKDIAKRLNNINKTIPSSWISNIDKYKKIFSEKYNFDKDNTGNFVVNIDKFNSLYSDLTNVMSEVVYSSQYNVKNRTHYFSRHYLPVFANILDDNIYTIRDGFNLTNKGFNIENSGQNIERNPALQKLSSESVVDLFTKVCVDKSEEKLYDDDDKDRWGSSLQCIKVKNNRLPYVADKDSISQEIFENKIITDETNVQNYSDKFSLDESILDGQVPINPEIVDPLLPNVNMEPLNLPGEEIVFYDDITKYVDYLNSYYYLESQKLSNNVENITLTTSVEEALGYSNKIYTFLPSLAEKVNKGVQAGLFLNWANEVVEDFTTNIMKKDTLDKISDVSVIIPYIGPALNIGNSALRGNFNQAFATAGVAFLLEGFPEFTIPALGVFTFYSSIQEREKIIKTIENCLEQRVKRWKDSYQWMVSNWLSRITTQFNHINYQMYDSLSYQADAIKAKIDLEYKKYSGSDKENIKSQVENLKNSLDVKISEAMNNINKFIRECSVTYLFKNMLPKVIDELNKFDLRTKTELINLIDSHNIILVGEVDRLKAKVNESFENTMPFNIFSYTNNSLLKDIINEYFNLEGGGGSGGGGSGGGGSALVYADAIFTNSYRKVLGQLSARKLLQDIMSRQQGESNQERGA

SEQ ID NO: 10 - protein, 944 aa, Artificial Sequence
  source: /note="Description of Artificial Sequence: Synthetic polypeptide"
TWPVKDFNYSDPVNDNDILYLRIPQNKLITTPVKAFMITQNIWVIPERFSSDTNPSLSKPPRPTSKYQSYYDPSYLSTDEQKDTFLKGIIKLFKRINERDIGKKLINYLVVGSPFMGDSSTPEDTFDFTRHTTNIAVEKFENGSWKVTNIITPSVLIFGPLPNILDYTASLTLQGQQSNPSFEGFGTLSILKVAPEFLLTFSDVTSNQSSAVLGKSIFCMDPVIALMHELTHSLHQLYGINIPSDKRIRPQVSEGFFSQDGPNVQFEELYTFGGLDVEIIPQIERSQLREKALGHYKDIAKRLNNINKTIPSSWISNIDKYKKIFSEKYNFDKDNTGNFVVNIDKFNSLYSDLTNVMSEVVYSSQYNVKNRTHYFSRHYLPVFANILDDNIYTIRDGFNLTNKGFNIENSGQNIERNPALQKLSSESVVDLFTKVCVDKSEEKLYDDDDKDRWGSSLQCIKVKNNRLPYVADKDSISQEIFENKIITDETNVQNYSDKFSLDESILDGQVPINPEIVDPLLPNVNMEPLNLPGEEIVFYDDITKYVDYLNSYYYLESQKLSNNVENITLTTSVEEALGYSNKIYTFLPSLAEKVNKGVQAGLFLNWANEVVEDFTTNIMKKDTLDKISDVSVIIPYIGPALNIGNSALRGNFNQAFATAGVAFLLEGFPEFTIPALGVFTFYSSIQEREKIIKTIENCLEQRVKRWKDSYQWMVSNWLSRITTQFNHINYQMYDSLSYQADAIKAKIDLEYKKYSGSDKENIKSQVENLKNSLDVKISEAMNNINKFIRECSVTYLFKNMLPKVIDELNKFDLRTKTELINLIDSHNIILVGEVDRLKAKVNESFENTMPFNIFSYTNNSLLKDIINEYFNLEGGGGSGGGGSGGGGSALVNSDSECPLSHDGYCLHDGVCMYIEALDKYACNCVVGYIGERCQYRDLKWWELR

SEQ ID NO: 11 - protein, 1134 aa, Artificial Sequence [sequence omitted]

SEQ ID NO: 12 - protein, 898 aa, Artificial Sequence
  source: /note="Description of Artificial Sequence: Synthetic polypeptide"
TWPVKDFNYSDPVNDNDILYLRIPQNKLITTPVKAFMITQNIWVIPERFSSDTNPSLSKPPRPTSKYQSYYDPSYLSTDEQKDTFLKGIIKLFKRINERDIGKKLINYLVVGSPFMGDSSTPEDTFDFTRHTTNIAVEKFENGSWKVTNIITPSVLIFGPLPNILDYTASLTLQGQQSNPSFEGFGTLSILKVAPEFLLTFSDVTSNQSSAVLGKSIFCMDPVIALMHELTHSLHQLYGINIPSDKRIRPQVSEGFFSQDGPNVQFEELYTFGGLDVEIIPQIERSQLREKALGHYKDIAKRLNNINKTIPSSWISNIDKYKKIFSEKYNFDKDNTGNFVVNIDKFNSLYSDLTNVMSEVVYSSQYNVKNRTHYFSRHYLPVFANILDDNIYTIRDGFNLTNKGFNIENSGQNIERNPALQKLSSESVVDLFTKVCVDKSEEKLYDDDDKDRWGSSLQCIKVKNNRLPYVADKDSISQEIFENKIITDETNVQNYSDKFSLDESILDGQVPINPEIVDPLLPNVNMEPLNLPGEEIVFYDDITKYVDYLNSYYYLESQKLSNNVENITLTTSVEEALGYSNKIYTFLPSLAEKVNKGVQAGLFLNWANEVVEDFTTNIMKKDTLDKISDVSVIIPYIGPALNIGNSALRGNFNQAFATAGVAFLLEGFPEFTIPALGVFTFYSSIQEREKIIKTIENCLEQRVKRWKDSYQWMVSNWLSRITTQFNHINYQMYDSLSYQADAIKAKIDLEYKKYSGSDKENIKSQVENLKNSLDVKISEAMNNINKFIRECSVTYLFKNMLPKVIDELNKFDLRTKTELINLIDSHNIILVGEVDRLKAKVNESFENTMPFNIFSYTNNSLLKDIINEYFNLEGGGGSGGGGSGGGGSALVSCHLPWA

SEQ ID NO: 13 - protein, 919 aa, Artificial Sequence
  source: /note="Description of Artificial Sequence: Synthetic polypeptide"
TWPVKDFNYSDPVNDNDILYLRIPQNKLITTPVKAFMITQNIWVIPERFSSDTNPSLSKPPRPTSKYQSYYDPSYLSTDEQKDTFLKGIIKLFKRINERDIGKKLINYLVVGSPFMGDSSTPEDTFDFTRHTTNIAVEKFENGSWKVTNIITPSVLIFGPLPNILDYTASLTLQGQQSNPSFEGFGTLSILKVAPEFLLTFSDVTSNQSSAVLGKSIFCMDPVIALMHELTHSLHQLYGINIPSDKRIRPQVSEGFFSQDGPNVQFEELYTFGGLDVEIIPQIERSQLREKALGHYKDIAKRLNNINKTIPSSWISNIDKYKKIFSEKYNFDKDNTGNFVVNIDKFNSLYSDLTNVMSEVVYSSQYNVKNRTHYFSRHYLPVFANILDDNIYTIRDGFNLTNKGFNIENSGQNIERNPALQKLSSESVVDLFTKVCVDKSEEKLYDDDDKDRWGSSLQCIKVKNNRLPYVADKDSISQEIFENKIITDETNVQNYSDKFSLDESILDGQVPINPEIVDPLLPNVNMEPLNLPGEEIVFYDDITKYVDYLNSYYYLESQKLSNNVENITLTTSVEEALGYSNKIYTFLPSLAEKVNKGVQAGLFLNWANEVVEDFTTNIMKKDTLDKISDVSVIIPYIGPALNIGNSALRGNFNQAFATAGVAFLLEGFPEFTIPALGVFTFYSSIQEREKIIKTIENCLEQRVKRWKDSYQWMVSNWLSRITTQFNHINYQMYDSLSYQADAIKAKIDLEYKKYSGSDKENIKSQVENLKNSLDVKISEAMNNINKFIRECSVTYLFKNMLPKVIDELNKFDLRTKTELINLIDSHNIILVGEVDRLKAKVNESFENTMPFNIFSYTNNSLLKDIINEYFNLEGGGGSGGGGSGGGGSALVHSDAVFTDNYTRLRKQMAVKKYLNSILN

SEQ ID NO: 14 - protein, 892 aa, Artificial Sequence
  source: /note="Description of Artificial Sequence: Synthetic polypeptide"
PITINNFNYSDPVDNKNILYLDTHLNTLANEPEKAFRITGNIWVIPDRFSRNSNPNLNKPPRVTSPKSGYYDPNYLSTDSDKDTFLKEIIKLFKRINSREIGEELIYRLSTDIPFPGNNNTPINTFDFDVDFNSVDVKTRQGNNWVKTGSINPSVIITGPRENIIDPETSTFKLTNNTFAAQEGFGALSIISISPRFMLTYSNATNDVGEGRFSKSEFCMDPILILMHELNHAMHNLYGIAIPNDQTISSVTSNIFYSQYNVKLEYAEIYAFGGPTIDLIPKSARKYFEEKALDYYRSIAKRLNSITTANPSSFNKYIGEYKQKLIRKYRFVVESSGEVTVNRNKFVELYNELTQIFTEFNYAKIYNVQNRKIYLSNVYTPVTANILDDNVYDIQNGFNIPKSNLNVLFMGQNLSRNPALRKVNPENMLYLFTKFCVDAIDGRSLYNKTLQCRELLVKNTDLPFIGDISDVKTDIFLRKDINEETEVIYYPDNVSVDQVILSKNTSEHGQLDLLYPSIDSESEILPGENQVFYDNRTQNVDYLNSYYYLESQKLSDNVEDFTFTRSIEEALDNSAKVYTYFPTLANKVNAGVQGGLFLMWANDVVEDFTTNILRKDTLDKISDVSAIIPYIGPALNISNSVRRGNFTEAFAVTGVTILLEAFPEFTIPALGAFVIYSKVQERNEIIKTIDNCLEQRIKRWKDSYEWMMGTWLSRIITQFNNISYQMYDSLNYQAGAIKAKIDLEYKKYSGSDKENIKSQVENLKNSLDVKISEAMNNINKFIRECSVTYLFKNMLPKVIDELNEFDRNTKAKLINLIDSHNIILVGEVDKLKAKVNNSFQNTIPFNIFSYTNNSLLKDIINEYFNLEGGGGSGGGGSGGGGSALVSCHLPWA

SEQ ID NO: 15 - protein, 955 aa, Artificial Sequence
  source: /note="Description of Artificial Sequence: Synthetic polypeptide"
PITINNFNYSDPVDNKNILYLDTHLNTLANEPEKAFRITGNIWVIPDRFSRNSNPNLNKPPRVTSPKSGYYDPNYLSTDSDKDTFLKEIIKLFKRINSREIGEELIYRLSTDIPFPGNNNTPINTFDFDVDFNSVDVKTRQGNNWVKTGSINPSVIITGPRENIIDPETSTFKLTNNTFAAQEGFGALSIISISPRFMLTYSNATNDVGEGRFSKSEFCMDPILILMHELNHAMHNLYGIAIPNDQTISSVTSNIFYSQYNVKLEYAEIYAFGGPTIDLIPKSARKYFEEKALDYYRSIAKRLNSITTANPSSFNKYIGEYKQKLIRKYRFVVESSGEVTVNRNKFVELYNELTQIFTEFNYAKIYNVQNRKIYLSNVYTPVTANILDDNVYDIQNGFNIPKSNLNVLFMGQNLSRNPALRKVNPENMLYLFTKFCVDAIDGRSLYNKTLQCRELLVKNTDLPFIGDISDVKTDIFLRKDINEETEVIYYPDNVSVDQVILSKNTSEHGQLDLLYPSIDSESEILPGENQVFYDNRTQNVDYLNSYYYLESQKLSDNVEDFTFTRSIEEALDNSAKVYTYFPTLANKVNAGVQGGLFLMWANDVVEDFTTNILRKDTLDKISDVSAIIPYIGPALNISNSVRRGNFTEAFAVTGVTILLEAFPEFTIPALGAFVIYSKVQERNEIIKTIDNCLEQRIKRWKDSYEWMMGTWLSRIITQFNNISYQMYDSLNYQAGAIKAKIDLEYKKYSGSDKENIKSQVENLKNSLDVKISEAMNNINKFIRECSVTYLFKNMLPKVIDELNEFDRNTKAKLINLIDSHNIILVGEVDKLKAKVNNSFQNTIPFNIFSYTNNSLLKDIINEYFNLEGGGGSGGGGSGGGGSALVGPETLCGAELVDALQFVCGDRGFYFNKPTGYGSSSRRAPQTGIVDECCFRSCDLRRLEMYCAPLKPAKSA

SEQ ID NO: 16 - protein, 919 aa, Artificial Sequence
  source: /note="Description of Artificial Sequence: Synthetic polypeptide"
PITINNFNYSDPVDNKNILYLDTHLNTLANEPEKAFRITGNIWVIPDRFSRNSNPNLNKPPRVTSPKSGYYDPNYLSTDSDKDTFLKEIIKLFKRINSREIGEELIYRLSTDIPFPGNNNTPINTFDFDVDFNSVDVKTRQGNNWVKTGSINPSVIITGPRENIIDPETSTFKLTNNTFAAQEGFGALSIISISPRFMLTYSNATNDVGEGRFSKSEFCMDPILILMHELNHAMHNLYGIAIPNDQTISSVTSNIFYSQYNVKLEYAEIYAFGGPTIDLIPKSARKYFEEKALDYYRSIAKRLNSITTANPSSFNKYIGEYKQKLIRKYRFVVESSGEVTVNRNKFVELYNELTQIFTEFNYAKIYNVQNRKIYLSNVYTPVTANILDDNVYDIQNGFNIPKSNLNVLFMGQNLSRNPALRKVNPENMLYLFTKFCVDAIDGRSLYNKTLQCRELLVKNTDLPFIGDISDVKTDIFLRKDINEETEVIYYPDNVSVDQVILSKNTSEHGQLDLLYPSIDSESEILPGENQVFYDNRTQNVDYLNSYYYLESQKLSDNVEDFTFTRSIEEALDNSAKVYTYFPTLANKVNAGVQGGLFLMWANDVVEDFTTNILRKDTLDKISDVSAIIPYIGPALNISNSVRRGNFTEAFAVTGVTILLEAFPEFTIPALGAFVIYSKVQERNEIIKTIDNCLEQRIKRWKDSYEWMMGTWLSRIITQFNNISYQMYDSLNYQAGAIKAKIDLEYKKYSGSDKENIKSQVENLKNSLDVKISEAMNNINKFIRECSVTYLFKNMLPKVIDELNEFDRNTKAKLINLIDSHNIILVGEVDKLKAKVNNSFQNTIPFNIFSYTNNSLLKDIINEYFNLEGGGGSGGGGSGGGGSGGGGSGGGGSGGGGSGGGGSALVAGCKNFFWKTFTSC

SEQ ID NO: 17 - protein, 919 aa, Artificial Sequence
  source: /note="Description of Artificial Sequence: Synthetic polypeptide"
TWPVKDFNYSDPVNDNDILYLRIPQNKLITTPVKAFMITQNIWVIPERFSSDTNPSLSKPPRPTSKYQSYYDPSYLSTDEQKDTFLKGIIKLFKRINERDIGKKLINYLVVGSPFMGDSSTPEDTFDFTRHTTNIAVEKFENGSWKVTNIITPSVLIFGPLPNILDYTASLTLQGQQSNPSFEGFGTLSILKVAPEFLLTFSDVTSNQSSAVLGKSIFCMDPVIALMHELTHSLHQLYGINIPSDKRIRPQVSEGFFSQDGPNVQFEELYTFGGLDVEIIPQIERSQLREKALGHYKDIAKRLNNINKTIPSSWISNIDKYKKIFSEKYNFDKDNTGNFVVNIDKFNSLYSDLTNVMSEVVYSSQYNVKNRTHYFSRHYLPVFANILDDNIYTIRDGFNLTNKGFNIENSGQNIERNPALQKLSSESVVDLFTKVCVDKSEEKLYDDDDKDRWGSSLQCIKVKNNRLPYVADKDSISQEIFENKIITDETNVQNYSDKFSLDESILDGQVPINPEIVDPLLPNVNMEPLNLPGEEIVFYDDITKYVDYLNSYYYLESQKLSNNVENITLTTSVEEALGYSNKIYTFLPSLAEKVNKGVQAGLFLNWANEVVEDFTTNIMKKDTLDKISDVSVIIPYIGPALNIGNSALRGNFNQAFATAGVAFLLEGFPEFTIPALGVFTFYSSIQEREKIIKTIENCLEQRVKRWKDSYQWMVSNWLSRITTQFNHINYQMYDSLSYQADAIKAKIDLEYKKYSGSDKENIKSQVENLKNSLDVKISEAMNNINKFIRECSVTYLFKNMLPKVIDELNKFDLRTKTELINLIDSHNIILVGEVDRLKAKVNESFENTMPFNIFSYTNNSLLKDIINEYFNLEGGGGSGGGGSGGGGSALVGSSFLSPEHQRVQQRKESKKPPAKLQPR

SEQ ID NO: 18 - protein, 961 aa, Artificial Sequence
  source: /note="Description of Artificial Sequence: Synthetic polypeptide"
TWPVKDFNYSDPVNDNDILYLRIPQNKLITTPVKAFMITQNIWVIPERFSSDTNPSLSKPPRPTSKYQSYYDPSYLSTDEQKDTFLKGIIKLFKRINERDIGKKLINYLVVGSPFMGDSSTPEDTFDFTRHTTNIAVEKFENGSWKVTNIITPSVLIFGPLPNILDYTASLTLQGQQSNPSFEGFGTLSILKVAPEFLLTFSDVTSNQSSAVLGKSIFCMDPVIALMHELTHSLHQLYGINIPSDKRIRPQVSEGFFSQDGPNVQFEELYTFGGLDVEIIPQIERSQLREKALGHYKDIAKRLNNINKTIPSSWISNIDKYKKIFSEKYNFDKDNTGNFVVNIDKFNSLYSDLTNVMSEVVYSSQYNVKNRTHYFSRHYLPVFANILDDNIYTIRDGFNLTNKGFNIENSGQNIERNPALQKLSSESVVDLFTKVCVDKSEEKLYDDDDKDRWGSSLQCIKVKNNRLPYVADKDSISQEIFENKIITDETNVQNYSDKFSLDESILDGQVPINPEIVDPLLPNVNMEPLNLPGEEIVFYDDITKYVDYLNSYYYLESQKLSNNVENITLTTSVEEALGYSNKIYTFLPSLAEKVNKGVQAGLFLNWANEVVEDFTTNIMKKDTLDKISDVSVIIPYIGPALNIGNSALRGNFNQAFATAGVAFLLEGFPEFTIPALGVFTFYSSIQEREKIIKTIENCLEQRVKRWKDSYQWMVSNWLSRITTQFNHINYQMYDSLSYQADAIKAKIDLEYKKYSGSDKENIKSQVENLKNSLDVKISEAMNNINKFIRECSVTYLFKNMLPKVIDELNKFDLRTKTELINLIDSHNIILVGEVDRLKAKVNESFENTMPFNIFSYTNNSLLKDIINEYFNLEGGGGSGGGGSGGGGSALVGPETLCGAELVDALQFVCGDRGFYFNKPTGYGSSSRRAPQTGIVDECCFRSCDLRRLEMYCAPLKPAKSA

SEQ ID NO: 19 - protein, 1108 aa, Artificial Sequence
  source: /note="Description of Artificial Sequence: Synthetic polypeptide"
PITINNFNYSDPVDNKNILYLDTHLNTLANEPEKAFRITGNIWVIPDRFSRNSNPNLNKPPRVTSPKSGYYDPNYLSTDSDKDTFLKEIIKLFKRINSREIGEELIYRLSTDIPFPGNNNTPINTFDFDVDFNSVDVKTRQGNNWVKTGSINPSVIITGPRENIIDPETSTFKLTNNTFAAQEGFGALSIISISPRFMLTYSNATNDVGEGRFSKSEFCMDPILILMHELNHAMHNLYGIAIPNDQTISSVTSNIFYSQYNVKLEYAEIYAFGGPTIDLIPKSARKYFEEKALDYYRSIAKRLNSITTANPSSFNKYIGEYKQKLIRKYRFVVESSGEVTVNRNKFVELYNELTQIFTEFNYAKIYNVQNRKIYLSNVYTPVTANILDDNVYDIQNGFNIPKSNLNVLFMGQNLSRNPALRKVNPENMLYLFTKFCVDAIDGRSLYNKTLQCRELLVKNTDLPFIGDISDVKTDIFLRKDINEETEVIYYPDNVSVDQVILSKNTSEHGQLDLLYPSIDSESEILPGENQVFYDNRTQNVDYLNSYYYLESQKLSDNVEDFTFTRSIEEALDNSAKVYTYFPTLANKVNAGVQGGLFLMWANDVVEDFTTNILRKDTLDKISDVSAIIPYIGPALNISNSVRRGNFTEAFAVTGVTILLEAFPEFTIPALGAFVIYSKVQERNEIIKTIDNCLEQRIKRWKDSYEWMMGTWLSRIITQFNNISYQMYDSLNYQAGAIKAKIDLEYKKYSGSDKENIKSQVENLKNSLDVKISEAMNNINKFIRECSVTYLFKNMLPKVIDELNEFDRNTKAKLINLIDSHNIILVGEVDKLKAKVNNSFQNTIPFNIFSYTNNSLLKDIINEYFNLEGGGGSGGGGSGGGGSALVEPHSESNVPAGHTIPQAHWTKLQHSLDTALRRARSAPAAAIAARVAGQTRNITVDPRLFKKRRLRSPRVLFSTQPPREAADTQDLDFEVGGAAPFNRTHRSKRSSSHPIFHRGEFSVCDSVSVWVGDKTTATDIKGKEVMVLGEVNINNSVFKQYFFETKCRDPNPVDSGCRGIDSKHWNSYCTTTHTFVKALTMDGKQAAWRFIRIDTACVCVLSRKAVRRA

SEQ ID NO: 20 - protein, 910 aa, Artificial Sequence
  source: /note="Description of Artificial Sequence: Synthetic polypeptide"
TWPVKDFNYSDPVNDNDILYLRIPQNKLITTPVKAFMITQNIWVIPERFSSDTNPSLSKPPRPTSKYQSYYDPSYLSTDEQKDTFLKGIIKLFKRINERDIGKKLINYLVVGSPFMGDSSTPEDTFDFTRHTTNIAVEKFENGSWKVTNIITPSVLIFGPLPNILDYTASLTLQGQQSNPSFEGFGTLSILKVAPEFLLTFSDVTSNQSSAVLGKSIFCMDPVIALMHELTHSLHQLYGINIPSDKRIRPQVSEGFFSQDGPNVQFEELYTFGGLDVEIIPQIERSQLREKALGHYKDIAKRLNNINKTIPSSWISNIDKYKKIFSEKYNFDKDNTGNFVVNIDKFNSLYSDLTNVMSEVVYSSQYNVKNRTHYFSRHYLPVFANILDDNIYTIRDGFNLTNKGFNIENSGQNIERNPALQKLSSESVVDLFTKVCVDKSEEKLYDDDDKDRWGSSLQCIKVKNNRLPYVADKDSISQEIFENKIITDETNVQNYSDKFSLDESILDGQVPINPEIVDPLLPNVNMEPLNLPGEEIVFYDDITKYVDYLNSYYYLESQKLSNNVENITLTTSVEEALGYSNKIYTFLPSLAEKVNKGVQAGLFLNWANEVVEDFTTNIMKKDTLDKISDVSVIIPYIGPALNIGNSALRGNFNQAFATAGVAFLLEGFPEFTIPALGVFTFYSSIQEREKIIKTIENCLEQRVKRWKDSYQWMVSNWLSRITTQFNHINYQMYDSLSYQADAIKAKIDLEYKKYSGSDKENIKSQVENLKNSLDVKISEAMNNINKFIRECSVTYLFKNMLPKVIDELNKFDLRTKTELINLIDSHNIILVGEVDRLKAKVNESFENTMPFNIFSYTNNSLLKDIINEYFNLEGGGGSGGGGSGGGGSGGGGSALVAGCKNFFWKTFTSC

SEQ ID NO: 21 - protein, 913 aa, Artificial Sequence
  source: /note="Description of Artificial Sequence: Synthetic polypeptide"
PITINNFNYSDPVDNKNILYLDTHLNTLANEPEKAFRITGNIWVIPDRFSRNSNPNLNKPPRVTSPKSGYYDPNYLSTDSDKDTFLKEIIKLFKRINSREIGEELIYRLSTDIPFPGNNNTPINTFDFDVDFNSVDVKTRQGNNWVKTGSINPSVIITGPRENIIDPETSTFKLTNNTFAAQEGFGALSIISISPRFMLTYSNATNDVGEGRFSKSEFCMDPILILMHELNHAMHNLYGIAIPNDQTISSVTSNIFYSQYNVKLEYAEIYAFGGPTIDLIPKSARKYFEEKALDYYRSIAKRLNSITTANPSSFNKYIGEYKQKLIRKYRFVVESSGEVTVNRNKFVELYNELTQIFTEFNYAKIYNVQNRKIYLSNVYTPVTANILDDNVYDIQNGFNIPKSNLNVLFMGQNLSRNPALRKVNPENMLYLFTKFCVDAIDGRSLYNKTLQCRELLVKNTDLPFIGDISDVKTDIFLRKDINEETEVIYYPDNVSVDQVILSKNTSEHGQLDLLYPSIDSESEILPGENQVFYDNRTQNVDYLNSYYYLESQKLSDNVEDFTFTRSIEEALDNSAKVYTYFPTLANKVNAGVQGGLFLMWANDVVEDFTTNILRKDTLDKISDVSAIIPYIGPALNISNSVRRGNFTEAFAVTGVTILLEAFPEFTIPALGAFVIYSKVQERNEIIKTIDNCLEQRIKRWKDSYEWMMGTWLSRIITQFNNISYQMYDSLNYQAGAIKAKIDLEYKKYSGSDKENIKSQVENLKNSLDVKISEAMNNINKFIRECSVTYLFKNMLPKVIDELNEFDRNTKAKLINLIDSHNIILVGEVDKLKAKVNNSFQNTIPFNIFSYTNNSLLKDIINEYFNLEGGGGSGGGGSGGGGSALVHSDAVFTDNYTRLRKQMAVKKYLNSILN

SEQ ID NO: 22 - protein, 912 aa, Artificial Sequence
  source: /note="Description of Artificial Sequence: Synthetic polypeptide"
EFVNKQFNYKDPVNGVDIAYIKIPNAGQMQPVKAFKIHNKIWVIPERDTFTNPEEGDLNPPPEAKQVPVSYYDSTYLSTDNEKDNYLKGVTKLFERIYSTDLGRMLLTSIVRGIPFWGGSTIDTELKVIDTNCINVIQPDGSYRSEELNLVIIGPSADIIQFECKSFGHEVLNLTRNGYGSTQYIRFSPDFTFGFEESLEVDTNPLLGAGKFATDPAVTLAHELIHAGHRLYGIAINPNRVFKVNTNAYYEMSGLEVSFEELRTFGGHDAKFIDSLQENEFRLYYYNKFKDIASTLNKAKSIVGTTASLQYMKNVFKEKYLLSEDTSGKFSVDKLKFDKLYKMLTEIYTEDNFVKFFKVLNRKTYLNFDKAVFKINIVPKVNYTIYDGFNLRNTNLAANFNGQNTEINNMNFTKLKNFTGLFEFYKLLCVDGIITSKTKSDDDDKNKALNLQCIKVNNWDLFFSPSEDNFTNDLNKGEEITSDTNIEAAEENISLDLIQQYYLTFNFDNEPENISIENLSSDIIGQLELMPNIERFPNGKKYELDKYTMFHYLRAQEFEHGKSRIALTNSVNEALLNPSRVYTFFSSDYVKKVNKATEAAMFLGWVEQLVYDFTDETSEVSTTDKIADITIIIPYIGPALNIGNMLYKDDFVGALIFSGAVILLEFIPEIAIPVLGTFALVSYIANKVLTVQTIDNALSKRNEKWDEVYKYIVTNWLAKVNTQIDLIRKKMKEALENQAEATKAIINYQYNQYTEEEKNNINFNIDDLSSKLNESINKAMININKFLNQCSVSYLMNSMIPYGVKRLEDFDASLKDALLKYIYDNRGTLIGQVDRLKDKVNNTLSTDIPFQLSKYVDNQRLLSTLEGGGGSGGGGSGGGGSALVGSSFLSPEHQRVQQRKESKKPPAKLQPR

SEQ ID NO: 23 - protein, 916 aa, Artificial Sequence
  source: /note="Description of Artificial Sequence: Synthetic polypeptide"
TWPVKDFNYSDPVNDNDILYLRIPQNKLITTPVKAFMITQNIWVIPERFSSDTNPSLSKPPRPTSKYQSYYDPSYLSTDEQKDTFLKGIIKLFKRINERDIGKKLINYLVVGSPFMGDSSTPEDTFDFTRHTTNIAVEKFENGSWKVTNIITPSVLIFGPLPNILDYTASLTLQGQQSNPSFEGFGTLSILKVAPEFLLTFSDVTSNQSSAVLGKSIFCMDPVIALMHELTHSLHQLYGINIPSDKRIRPQVSEGFFSQDGPNVQFEELYTFGGLDVEIIPQIERSQLREKALGHYKDIAKRLNNINKTIPSSWISNIDKYKKIFSEKYNFDKDNTGNFVVNIDKFNSLYSDLTNVMSEVVYSSQYNVKNRTHYFSRHYLPVFANILDDNIYTIRDGFNLTNKGFNIENSGQNIERNPALQKLSSESVVDLFTKVCVDGIITSKTKSIEGRYADAIFTASYRNVLGQLSARKLLQDILSRALAGGGGSGGGGSGGGGSALALQCIKVKNNRLPYVADKDSISQEIFENKIITDETNVQNYSDKFSLDESILDGQVPINPEIVDPLLPNVNMEPLNLPGEEIVFYDDITKYVDYLNSYYYLESQKLSNNVENITLTTSVEEALGYSNKIYTFLPSLAEKVNKGVQAGLFLNWANEVVEDFTTNIMKKDTLDKISDVSVIIPYIGPALNIGNSALRGNFNQAFATAGVAFLLEGFPEFTIPALGVFTFYSSIQEREKIIKTIENCLEQRVKRWKDSYQWMVSNWLSRITTQFNHINYQMYDSLSYQADAIKAKIDLEYKKYSGSDKENIKSQVENLKNSLDVKISEAMNNINKFIRECSVTYLFKNMLPKVIDELNKFDLRTKTELINLIDSHNIILVGEVDRLKAKVNESFENTMPFNIFSYTNNSLLKDIINEYFN

SEQ ID NO: 24 - protein, 910 aa, Artificial Sequence
  source: /note="Description of Artificial Sequence: Synthetic polypeptide"
HVDAIFTQSYRKVLAQLSARKLLQDILNRNNNNNNNNNNTWPVKDFNYSDPVNDNDILYLRIPQNKLITTPVKAFMITQNIWVIPERFSSDTNPSLSKPPRPTSKYQSYYDPSYLSTDEQKDTFLKGIIKLFKRINERDIGKKLINYLVVGSPFMGDSSTPEDTFDFTRHTTNIAVEKFENGSWKVTNIITPSVLIFGPLPNILDYTASLTLQGQQSNPSFEGFGTLSILKVAPEFLLTFSDVTSNQSSAVLGKSIFCMDPVIALMHELTHSLHQLYGINIPSDKRIRPQVSEGFFSQDGPNVQFEELYTFGGLDVEIIPQIERSQLREKALGHYKDIAKRLNNINKTIPSSWISNIDKYKKIFSEKYNFDKDNTGNFVVNIDKFNSLYSDLTNVMSEVVYSSQYNVKNRTHYFSRHYLPVFANILDDNIYTIRDGFNLTNKGFNIENSGQNIERNPALQKLSSESVVDLFTKVCVDKSEEKLYDDDDKDRWGSSLQCIKVKNNRLPYVADKDSISQEIFENKIITDETNVQNYSDKFSLDESILDGQVPINPEIVDPLLPNVNMEPLNLPGEEIVFYDDITKYVDYLNSYYYLESQKLSNNVENITLTTSVEEALGYSNKIYTFLPSLAEKVNKGVQAGLFLNWANEVVEDFTTNIMKKDTLDKISDVSVIIPYIGPALNIGNSALRGNFNQAFATAGVAFLLEGFPEFTIPALGVFTFYSSIQEREKIIKTIENCLEQRVKRWKDSYQWMVSNWLSRITTQFNHINYQMYDSLSYQADAIKAKIDLEYKKYSGSDKENIKSQVENLKNSLDVKISEAMNNINKFIRECSVTYLFKNMLPKVIDELNKFDLRTKTELINLIDSHNIILVGEVDRLKAKVNESFENTMPFNIFSYTNNSLLKDIINEYFN

SEQ ID NO: 25 - protein, 714 aa, Artificial Sequence
  source: /note="Description of Artificial Sequence: Synthetic polypeptide"
ESNQPEKNGTATKPENSGNTTSENGQTEPEKKLELRNVSDIELYSQTNGTYRQHVSLDGIPENTDTYFVKVKSSAFKDVYIPVASITEEKRNGQSVYKITAKAEKLQQELENKYVDNFTFYLDKKAKEENTNFTSFSNLVKAINQNPSGTYHLAASLNANEVELGPDERSYIKDTFTGRLIGEKDGKNYAIYNLKKPLFENLSGATVEKLSLKNVAISGKNDIGSLANEATNGTKIKQVHVDGCVDGIITSKTKSDDDDKNKALNLQCIKIKNEDLTFIAEKNSFSEEPFQDEIVSYNTKNKPLNFNYSLDKIIVDYNLQSKITLPNDRTTPVTKGIPYAPEYKSNAASTIEIHNIDDNTIYQYLYAQKSPTTLQRITMTNSVDDALINSTKIYSYFPSVISKVNQGAQGILFLQWVRDIIDDFTNESSQKTTIDKISDVSTIVPYIGPALNIVKQGYEGNFIGALETTGVVLLLEYIPEITLPVIAALSIAESSTQKEKIIKTIDNFLEKRYEKWIEVYKLVKAKWLGTVNTQFQKRSYQMYRSLEYQVDAIKKIIDYEYKIYSGPDKEQIADEINNLKNKLEEKANKAMININIFMRESSRSFLVNQMINEAKKQLLEFDTQSKNILMQYIKANSKFIGITELKKLESKINKVFSTPIPFSYSKNLDCWVDNEEDIDVLEGGGGSGGGGSGGGGSALVAGCKNFFWKTFTSC

SEQ ID NO: 26 - protein, 728 aa, Artificial Sequence
  source: /note="Description of Artificial Sequence: Synthetic polypeptide"
ESNQPEKNGTATKPENSGNTTSENGQTEPEKKLELRNVSDIELYSQTNGTYRQHVSLDGIPENTDTYFVKVKSSAFKDVYIPVASITEEKRNGQSVYKITAKAEKLQQELENKYVDNFTFYLDKKAKEENTNFTSFSNLVKAINQNPSGTYHLAASLNANEVELGPDERSYIKDTFTGRLIGEKDGKNYAIYNLKKPLFENLSGATVEKLSLKNVAISGKNDIGSLANEATNGTKIKQVHVDGCVDGIITSKTKSDDDDKNKALNLQCIKIKNEDLTFIAEKNSFSEEPFQDEIVSYNTKNKPLNFNYSLDKIIVDYNLQSKITLPNDRTTPVTKGIPYAPEYKSNAASTIEIHNIDDNTIYQYLYAQKSPTTLQRITMTNSVDDALINSTKIYSYFPSVISKVNQGAQGILFLQWVRDIIDDFTNESSQKTTIDKISDVSTIVPYIGPALNIVKQGYEGNFIGALETTGVVLLLEYIPEITLPVIAALSIAESSTQKEKIIKTIDNFLEKRYEKWIEVYKLVKAKWLGTVNTQFQKRSYQMYRSLEYQVDAIKKIIDYEYKIYSGPDKEQIADEINNLKNKLEEKANKAMININIFMRESSRSFLVNQMINEAKKQLLEFDTQSKNILMQYIKANSKFIGITELKKLESKINKVFSTPIPFSYSKNLDCWVDNEEDIDVLEGGGGSGGGGSGGGGSALVGSSFLSPEHQRVQQRKESKKPPAKLQPR

SEQ ID NO: 27 - protein, 899 aa, Artificial Sequence
  source: /note="Description of Artificial Sequence: Synthetic polypeptide"
EFVNKQFNYKDPVNGVDIAYIKIPNAGQMQPVKAFKIHNKIWVIPERDTFTNPEEGDLNPPPEAKQVPVSYYDSTYLSTDNEKDNYLKGVTKLFERIYSTDLGRMLLTSIVRGIPFWGGSTIDTELKVIDTNCINVIQPDGSYRSEELNLVIIGPSADIIQFECKSFGHEVLNLTRNGYGSTQYIRFSPDFTFGFEESLEVDTNPLLGAGKFATDPAVTLAHELIHAGHRLYGIAINPNRVFKVNTNAYYEMSGLEVSFEELRTFGGHDAKFIDSLQENEFRLYYYNKFKDIASTLNKAKSIVGTTASLQYMKNVFKEKYLLSEDTSGKFSVDKLKFDKLYKMLTEIYTEDNFVKFFKVLNRKTYLNFDKAVFKINIVPKVNYTIYDGFNLRNTNLAANFNGQNTEINNMNFTKLKNFTGLFEFYKLLCVDGIITSKTKSDDDDKNKALNLQCIKVNNWDLFFSPSEDNFTNDLNKGEEITSDTNIEAAEENISLDLIQQYYLTFNFDNEPENISIENLSSDIIGQLELMPNIERFPNGKKYELDKYTMFHYLRAQEFEHGKSRIALTNSVNEALLNPSRVYTFFSSDYVKKVNKATEAAMFLGWVEQLVYDFTDETSEVSTTDKIADITIIIPYIGPALNIGNMLYKDDFVGALIFSGAVILLEFIPEIAIPVLGTFALVSYIANKVLTVQTIDNALSKRNEKWDEVYKYIVTNWLAKVNTQIDLIRKKMKEALENQAEATKAIINYQYNQYTEEEKNNINFNIDDLSSKLNESINKAMININKFLNQCSVSYLMNSMIPYGVKRLEDFDASLKDALLKYIYDNRGTLIGQVDRLKDKVNNTLSTDIPFQLSKYVDNQRLLSTLEIYALVGSWFLSPEHQRVQQRKESKKPPAKLQPR

SEQ ID NO: 28 - protein, 929 aa, Artificial Sequence
  source: /note="Description of Artificial Sequence: Synthetic polypeptide"
TWPVKDFNYSDPVNDNDILYLRIPQNKLITTPVKAFMITQNIWVIPERFSSDTNPSLSKPPRPTSKYQSYYDPSYLSTDEQKDTFLKGIIKLFKRINERDIGKKLINYLVVGSPFMGDSSTPEDTFDFTRHTTNIAVEKFENGSWKVTNIITPSVLIFGPLPNILDYTASLTLQGQQSNPSFEGFGTLSILKVAPEFLLTFSDVTSNQSSAVLGKSIFCMDPVIALMHELTHSLHQLYGINIPSDKRIRPQVSEGFFSQDGPNVQFEELYTFGGLDVEIIPQIERSQLREKALGHYKDIAKRLNNINKTIPSSWISNIDKYKKIFSEKYNFDKDNTGNFVVNIDKFNSLYSDLTNVMSEVVYSSQYNVKNRTHYFSRHYLPVFANILDDNIYTIRDGFNLTNKGFNIENSGQNIERNPALQKLSSESVVDLFTKVCVDKSEEKLYDDDDKDRWGSSLQCIKVKNNRLPYVADKDSISQEIFENKIITDETNVQNYSDKFSLDESILDGQVPINPEIVDPLLPNVNMEPLNLPGEEIVFYDDITKYVDYLNSYYYLESQKLSNNVENITLTTSVEEALGYSNKIYTFLPSLAEKVNKGVQAGLFLNWANEVVEDFTTNIMKKDTLDKISDVSVIIPYIGPALNIGNSALRGNFNQAFATAGVAFLLEGFPEFTIPALGVFTFYSSIQEREKIIKTIENCLEQRVKRWKDSYQWMVSNWLSRITTQFNHINYQMYDSLSYQADAIKAKIDLEYKKYSGSDKENIKSQVENLKNSLDVKISEAMNNINKFIRECSVTYLFKNMLPKVIDELNKFDLRTKTELINLIDSHNIILVGEVDRLKAKVNESFENTMPFNIFSYTNNSLLKDIINEYFNLEGGGGSGGGGSGGGGSGGGGSGGGGSALVSANSNPAMAPRERKAGCKNFFWKTFTSC

SEQ ID NO: 29 - protein, 901 aa, Artificial Sequence
  source: /note="Description of Artificial Sequence: Synthetic polypeptide"
TWPVKDFNYSDPVNDNDILYLRIPQNKLITTPVKAFMITQNIWVIPERFSSDTNPSLSKPPRPTSKYQSYYDPSYLSTDEQKDTFLKGIIKLFKRINERDIGKKLINYLVVGSPFMGDSSTPEDTFDFTRHTTNIAVEKFENGSWKVTNIITPSVLIFGPLPNILDYTASLTLQGQQSNPSFEGFGTLSILKVAPEFLLTFSDVTSNQSSAVLGKSIFCMDPVIALMHELTHSLHQLYGINIPSDKRIRPQVSEGFFSQDGPNVQFEELYTFGGLDVEIIPQIERSQLREKALGHYKDIAKRLNNINKTIPSSWISNIDKYKKIFSEKYNFDKDNTGNFVVNIDKFNSLYSDLTNVMSEVVYSSQYNVKNRTHYFSRHYLPVFANILDDNIYTIRDGFNLTNKGFNIENSGQNIERNPALQKLSSESVVDLFTKVCVDKSEEKLYDDDDKDRWGSSLQCIKVKNNRLPYVADKDSISQEIFENKIITDETNVQNYSDKFSLDESILDGQVPINPEIVDPLLPNVNMEPLNLPGEEIVFYDDITKYVDYLNSYYYLESQKLSNNVENITLTTSVEEALGYSNKIYTFLPSLAEKVNKGVQAGLFLNWANEVVEDFTTNIMKKDTLDKISDVSVIIPYIGPALNIGNSALRGNFNQAFATAGVAFLLEGFPEFTIPALGVFTFYSSIQEREKIIKTIENCLEQRVKRWKDSYQWMVSNWLSRITTQFNHINYQMYDSLSYQADAIKAKIDLEYKKYSGSDKENIKSQVENLKNSLDVKISEAMNNINKFIRECSVTYLFKNMLPKVIDELNKFDLRTKTELINLIDSHNIILVGEVDRLKAKVNESFENTMPFNIFSYTNNSLLKDIINEYFNLEGGGGSGGGGSGGGGSALVGNHWAVGHLM

SEQ ID NO: 30 - protein, 899 aa, Artificial Sequence
  source: /note="Description of Artificial Sequence: Synthetic polypeptide"
PVTINNFNYNDPIDNNNIIMMEPPFARGTGRYYKAFKITDRIWIIPERYTFGYKPEDFNKSSGIFNRDVCEYYDPDYLNTNDKKNIFLQTMIKLFNRIKSKPLGEKLLEMIINGIPYLGDRRVPLEEFNTNIASVTVNKLISNPGEVERKKGIFANLIIFGPGPVLNENETIDIGIQNHFASREGFGGIMQMKFCPEYVSVFNNVQENKGASIFNRRGYFSDPALILMHELIHVLHGLYGIKVDDLPIVPNEKKFFMQSTDAIQAEELYTFGGQDPSIITPSTDKSIYDKVLQNFRGIVDRLNKVLVCISDPNININIYKNKFKDKYKFVEDSEGKYSIDVESFDKLYKSLMFGFTETNIAENYKIKTRASYFSDSLPPVKIKNLLDNEIYTIEEGFNISDKDMEKEYRGQNKAINKQAYEEISKEHLAVYKIQMCVDEEKLYDDDDKDRWGSSLQCIDVDNEDLFFIADKNSFSDDLSKNERIEYNTQSNYIENDFPINELILDTDLISKIELPSENTESLTDFNVDVPVYEKQPAIKKIFTDENTIFQYLYSQTFPLDIRDISLTSSFDDALLFSNKVYSFFSMDYIKTANKVVEAGLFAGWVKQIVNDFVIEANKSNTMDAIADISLIVPYIGLALNVGNETAKGNFENAFEIAGASILLEFIPELLIPVVGAFLLESYIDNKNKIIKTIDNALTKRNEKWSDMYGLIVAQWLSTVNTQFYTIKEGMYKALNYQAQALEEIIKYRYNIYSEKEKSNINIDFNDINSKLNEGINQAIDNINNFINGCSVSYLMKKMIPLAVEKLLDFDNTLKKNLLNYIDENKLYLIGSAEYEKSKVNKYLKTIMPFDLSIYTNDTILIEMFNKYNSLEGGGGSGGGGSGGGGSALVGNHWAVGHLM

SEQ ID NO: 31 - DNA, 205 bp, Artificial Sequence
  source: /note="Description of Artificial Sequence: Synthetic polynucleotide"
ggatccgtcgacaacaacaataacaacaacaataacaacaacgacgatgacgataaacatgtggatgcgatctttacccagagctatcggaaggttttggcccaactgtctgctcgtaaacttttacaggacattctgaacagagcagaagcggcagccaaagaagcagccgctaaggcgctgcagagtctagaataataagctt

SEQ ID NO: 32 - DNA, 2754 bp, Artificial Sequence
  source: /note="Description of Artificial Sequence: Synthetic polynucleotide"
ggatccatgacgtggccagttaaggatttcaactactcagatcctgtaaatgacaacgatattctgtaccttcgcattccacaaaataaactgatcaccacaccagtcaaagcattcatgattactcaaaacatttgggtcattccagaacgcttttctagtgacacaaatccgagtttatctaaacctccgcgtccgacgtccaaatatcagagctattacgatccctcatatctcagtacggacgaacaaaaagatactttccttaaaggtatcattaaactgtttaagcgtattaatgagcgcgatatcgggaaaaagttgattaattatcttgttgtgggttccccgttcatgggcgatagctctacccccgaagacacttttgattttacccgtcatacgacaaacatcgcggtagagaagtttgagaacggatcgtggaaagtcacaaacatcattacacctagcgtcttaatttttggtccgctgccaaacatcttagattatacagccagcctgactttgcaggggcaacagtcgaatccgagtttcgaaggttttggtaccctgagcattctgaaagttgccccggaatttctgctcactttttcagatgtcaccagcaaccagagctcagcagtattaggaaagtcaattttttgcatggacccggttattgcactgatgcacgaactgacgcactctctgcatcaactgtatgggatcaacatccccagtgacaaacgtattcgtccccaggtgtctgaaggatttttctcacaggatgggccgaacgtccagttcgaagagttgtatactttcggaggcctggacgtagagatcattccccagattgagcgcagtcagctgcgtgagaaggcattgggccattataaggatattgcaaaacgcctgaataacattaacaaaacgattccatcttcgtggatctcgaatattgataaatataagaaaatttttagcgagaaatataattttgataaagataatacaggtaactttgtggttaacattgacaaattcaactccctttacagtgatttgacgaatgtaatgagcgaagttgtgtatagttcccaatacaacgttaagaatcgtacccattacttctctcgtcactacctgccggttttcgcgaacatccttgacgataatatttacactattcgtgacggctttaacttgaccaacaagggcttcaatattgaaaattcaggccagaacattgaacgcaacccggccttgcagaaactgtcgagtgaatccgtggttgacctgtttaccaaagtctgcgtcgacaacaacaataacaacaacaataacaacaacgacgatgacgataaacatgtggatgcgatctttacccagagctatcggaaggttttggcccaactgtctgctcgtaaacttttacaggacattctgaacagagcagaagcggcagccaaagaagcagccgctaaggcgctgcagtgtattaaagtgaaaaacaatcggctgccttatgtagcagataaagatagcattagtcaggagattttcgaaaataaaattatcactgacgaaaccaatgttcagaattattcagataaattttcactggacgaaagcatcttagatggccaagttccgattaacccggaaattgttgatccgttactgccgaacgtgaatatggaaccgttaaacctccctggcgaagagatcgtattttatgatgacattacgaaatatgtggactaccttaattcttattactatttggaaagccagaaactgtccaataacgtggaaaacattactctgaccacaagcgtggaagaggctttaggctactcaaataagatttataccttcctcccgtcgctggcggaaaaagtaaataaaggtgtgcaggctggtctgttcctcaactgggcgaatgaagttgtcgaagactttaccacgaatattatgaaaaaggataccctggataaaatctccgacgtctcggttattatcccatatattggccctgcgttaaatatcggtaatagtgcgctgcgggggaattttaaccaggcctttgctaccgcgggcgtcgcgttcctcctggagggctttcctgaatttactatcccggcgctcggtgtttttacattttactcttccatccaggagcgtgagaaaattatcaaaaccatcgaaaactgcctggagcagcgggtgaaacgctggaaagattcttatcaatggatggtgtcaaactggttatctcgcatcacgacccaattcaaccatattaattaccagatgtatgatagtctgtcgtaccaagctgacgccattaaagccaaaattgatctggaatataaaaagtactctggtagcgataaggagaacatcaaaagccaggtggagaaccttaagaatagtctggatgtgaaaatctctgaagctatgaataacattaacaaattcattcgtgaatgttcggtgacgtacctgttcaagaatatgctgccaaaagttattgatgaactgaataaatttgatctgcgtaccaaaaccgaacttatcaacctcatcgactcccacaacattatccttgtgggcgaagtggatcgtctgaaggccaaagtaaacgagagctttgaaaatacgatgccgtttaatattttttcatataccaataactccttgctgaaagatatcatcaatgaatatttcaatctagaataatgaaagctt

SEQ ID NO: 33 - protein, 909 aa, Artificial Sequence
  source: /note="Description of Artificial Sequence: Synthetic polypeptide"
TWPVKDFNYSDPVNDNDILYLRIPQNKLITTPVKAFMITQNIWVIPERFSSDTNPSLSKPPRPTSKYQSYYDPSYLSTDEQKDTFLKGIIKLFKRINERDIGKKLINYLVVGSPFMGDSSTPEDTFDFTRHTTNIAVEKFENGSWKVTNIITPSVLIFGPLPNILDYTASLTLQGQQSNPSFEGFGTLSILKVAPEFLLTFSDVTSNQSSAVLGKSIFCMDPVIALMHELTHSLHQLYGINIPSDKRIRPQVSEGFFSQDGPNVQFEELYTFGGLDVEIIPQIERSQLREKALGHYKDIAKRLNNINKTIPSSWISNIDKYKKIFSEKYNFDKDNTGNFVVNIDKFNSLYSDLTNVMSEVVYSSQYNVKNRTHYFSRHYLPVFANILDDNIYTIRDGFNLTNKGFNIENSGQNIERNPALQKLSSESVVDLFTKVCVDNNNNNNNNNNDDDDKHVDAIFTQSYRKVLAQLSARKLLQDILNRAEAAAKEAAAKALQCIKVKNNRLPYVADKDSISQEIFENKIITDETNVQNYSDKFSLDESILDGQVPINPEIVDPLLPNVNMEPLNLPGEEIVFYDDITKYVDYLNSYYYLESQKLSNNVENITLTTSVEEALGYSNKIYTFLPSLAEKVNKGVQAGLFLNWANEVVEDFTTNIMKKDTLDKISDVSVIIPYIGPALNIGNSALRGNFNQAFATAGVAFLLEGFPEFTIPALGVFTFYSSIQEREKIIKTIENCLEQRVKRWKDSYQWMVSNWLSRITTQFNHINYQMYDSLSYQADAIKAKIDLEYKKYSGSDKENIKSQVENLKNSLDVKISEAMNNINKFIRECSVTYLFKNMLPKVIDELNKFDLRTKTELINLIDSHNIILVGEVDRLKAKVNESFENTMPFNIFSYTNNSLLKDIINEYFN

SEQ ID NO: 34 - protein, 919 aa, Artificial Sequence
  source: /note="Description of Artificial Sequence: Synthetic polypeptide"
EFVNKQFNYKDPVNGVDIAYIKIPNAGQMQPVKAFKIHNKIWVIPERDTFTNPEEGDLNPPPEAKQVPVSYYDSTYLSTDNEKDNYLKGVTKLFERIYSTDLGRMLLTSIVRGIPFWGGSTIDTELKVIDTNCINVIQPDGSYRSEELNLVIIGPSADIIQFECKSFGHEVLNLTRNGYGSTQYIRFSPDFTFGFEESLEVDTNPLLGAGKFATDPAVTLAHELIHAGHRLYGIAINPNRVFKVNTNAYYEMSGLEVSFEELRTFGGHDAKFIDSLQENEFRLYYYNKFKDIASTLNKAKSIVGTTASLQYMKNVFKEKYLLSEDTSGKFSVDKLKFDKLYKMLTEIYTEDNFVKFFKVLNRKTYLNFDKAVFKINIVPKVNYTIYDGFNLRNTNLAANFNGQNTEINNMNFTKLKNFTGLFEFYKLLCVDGIITSKTKSLIEGRHVDAIFTQSYRKVLAQLSARKLLQDILNRQQGERNQEQGALAGGGGSGGGGSGGGGSALVLQCIKVNNWDLFFSPSEDNFTNDLNKGEEITSDTNIEAAEENISLDLIQQYYLTFNFDNEPENISIENLSSDIIGQLELMPNIERFPNGKKYELDKYTMFHYLRAQEFEHGKSRIALTNSVNEALLNPSRVYTFFSSDYVKKVNKATEAAMFLGWVEQLVYDFTDETSEVSTTDKIADITIIIPYIGPALNIGNMLYKDDFVGALIFSGAVILLEFIPEIAIPVLGTFALVSYIANKVLTVQTIDNALSKRNEKWDEVYKYIVTNWLAKVNTQIDLIRKKMKEALENQAEATKAIINYQYNQYTEEEKNNINFNIDDLSSKLNESINKAMININKFLNQCSVSYLMNSMIPYGVKRLEDFDASLKDALLKYIYDNRGTLIGQVDRLKDKVNNTLSTDIPFQLSKYVDNQRLLST

SEQ ID NO: 35 - protein, 919 aa, Artificial Sequence
  source: /note="Description of Artificial Sequence: Synthetic polypeptide"
PITINNFNYSDPVDNKNILYLDTHLNTLANEPEKAFRITGNIWVIPDRFSRNSNPNLNKPPRVTSPKSGYYDPNYLSTDSDKDTFLKEIIKLFKRINSREIGEELIYRLSTDIPFPGNNNTPINTFDFDVDFNSVDVKTRQGNNWVKTGSINPSVIITGPRENIIDPETSTFKLTNNTFAAQEGFGALSIISISPRFMLTYSNATNDVGEGRFSKSEFCMDPILILMHELNHAMHNLYGIAIPNDQTISSVTSNIFYSQYNVKLEYAEIYAFGGPTIDLIPKSARKYFEEKALDYYRSIAKRLNSITTANPSSFNKYIGEYKQKLIRKYRFVVESSGEVTVNRNKFVELYNELTQIFTEFNYAKIYNVQNRKIYLSNVYTPVTANILDDNVYDIQNGFNIPKSNLNVLFMGQNLSRNPALRKVNPENMLYLFTKFCVDAIDGRHVDAIFTQSYRKVLAQLSARKLLQDILNRQQGERNQEQGALAGGGGSGGGGSGGGGSALVLQCRELLVKNTDLPFIGDISDVKTDIFLRKDINEETEVIYYPDNVSVDQVILSKNTSEHGQLDLLYPSIDSESEILPGENQVFYDNRTQNVDYLNSYYYLESQKLSDNVEDFTFTRSIEEALDNSAKVYTYFPTLANKVNAGVQGGLFLMWANDVVEDFTTNILRKDTLDKISDVSAIIPYIGPALNISNSVRRGNFTEAFAVTGVTILLEAFPEFTIPALGAFVIYSKVQERNEIIKTIDNCLEQRIKRWKDSYEWMMGTWLSRIITQFNNISYQMYDSLNYQAGAIKAKIDLEYKKYSGSDKENIKSQVENLKNSLDVKISEAMNNINKFIRECSVTYLFKNMLPKVIDELNEFDRNTKAKLINLIDSHNIILVGEVDKLKAKVNNSFQNTIPFNIFSYTNNSLLKDIINEYFN

SEQ ID NO: 36 - protein, 928 aa, Artificial Sequence
  source: /note="Description of Artificial Sequence: Synthetic polypeptide"
TWPVKDFNYSDPVNDNDILYLRIPQNKLITTPVKAFMITQNIWVIPERFSSDTNPSLSKPPRPTSKYQSYYDPSYLSTDEQKDTFLKGIIKLFKRINERDIGKKLINYLVVGSPFMGDSSTPEDTFDFTRHTTNIAVEKFENGSWKVTNIITPSVLIFGPLPNILDYTASLTLQGQQSNPSFEGFGTLSILKVAPEFLLTFSDVTSNQSSAVLGKSIFCMDPVIALMHELTHSLHQLYGINIPSDKRIRPQVSEGFFSQDGPNVQFEELYTFGGLDVEIIPQIERSQLREKALGHYKDIAKRLNNINKTIPSSWISNIDKYKKIFSEKYNFDKDNTGNFVVNIDKFNSLYSDLTNVMSEVVYSSQYNVKNRTHYFSRHYLPVFANILDDNIYTIRDGFNLTNKGFNIENSGQNIERNPALQKLSSESVVDLFTKVCVDGIITSKTKSDDDDKHVDAIFTQSYRKVLAQLSARKLLQDILNRQQGERNQEQGAALAGGGGSGGGGSGGGGSALALQCIKVKNNRLPYVADKDSISQEIFENKIITDETNVQNYSDKFSLDESILDGQVPINPEIVDPLLPNVNMEPLNLPGEEIVFYDDITKYVDYLNSYYYLESQKLSNNVENITLTTSVEEALGYSNKIYTFLPSLAEKVNKGVQAGLFLNWANEVVEDFTTNIMKKDTLDKISDVSVIIPYIGPALNIGNSALRGNFNQAFATAGVAFLLEGFPEFTIPALGVFTFYSSIQEREKIIKTIENCLEQRVKRWKDSYQWMVSNWLSRITTQFNHINYQMYDSLSYQADAIKAKIDLEYKKYSGSDKENIKSQVENLKNSLDVKISEAMNNINKFIRECSVTYLFKNMLPKVIDELNKFDLRTKTELINLIDSHNIILVGEVDRLKAKVNESFENTMPFNIFSYTNNSLLKDIINEYFN

SEQ ID NO: 37 - protein, 913 aa, Artificial Sequence
  source: /note="Description of Artificial Sequence: Synthetic polypeptide"
TWPVKDFNYSDPVNDNDILYLRIPQNKLITTPVKAFMITQNIWVIPERFSSDTNPSLSKPPRPTSKYQSYYDPSYLSTDEQKDTFLKGIIKLFKRINERDIGKKLINYLVVGSPFMGDSSTPEDTFDFTRHTTNIAVEKFENGSWKVTNIITPSVLIFGPLPNILDYTASLTLQGQQSNPSFEGFGTLSILKVAPEFLLTFSDVTSNQSSAVLGKSIFCMDPVIALMHELTHSLHQLYGINIPSDKRIRPQVSEGFFSQDGPNVQFEELYTFGGLDVEIIPQIERSQLREKALGHYKDIAKRLNNINKTIPSSWISNIDKYKKIFSEKYNFDKDNTGNFVVNIDKFNSLYSDLTNVMSEVVYSSQYNVKNRTHYFSRHYLPVFANILDDNIYTIRDGFNLTNKGFNIENSGQNIERNPALQKLSSESVVDLFTKVCVDNNNNNNNNNNDDDDKHVDAIFTQSYRKVLAQLSARKLLQDILNRQQGERNQEQGAPAPAPLQCIKVKNNRLPYVADKDSISQEIFENKIITDETNVQNYSDKFSLDESILDGQVPINPEIVDPLLPNVNMEPLNLPGEEIVFYDDITKYVDYLNSYYYLESQKLSNNVENITLTTSVEEALGYSNKIYTFLPSLAEKVNKGVQAGLFLNWANEVVEDFTTNIMKKDTLDKISDVSVIIPYIGPALNIGNSALRGNFNQAFATAGVAFLLEGFPEFTIPALGVFTFYSSIQEREKIIKTIENCLEQRVKRWKDSYQWMVSNWLSRITTQFNHINYQMYDSLSYQADAIKAKIDLEYKKYSGSDKENIKSQVENLKNSLDVKISEAMNNINKFIRECSVTYLFKNMLPKVIDELNKFDLRTKTELINLIDSHNIILVGEVDRLKAKVNESFENTMPFNIFSYTNNSLLKDIINEYFN

SEQ ID NO: 38 - protein, 919 aa, Artificial Sequence
  source: /note="Description of Artificial Sequence: Synthetic polypeptide"
TWPVKDFNYSDPVNDNDILYLRIPQNKLITTPVKAFMITQNIWVIPERFSSDTNPSLSKPPRPTSKYQSYYDPSYLSTDEQKDTFLKGIIKLFKRINERDIGKKLINYLVVGSPFMGDSSTPEDTFDFTRHTTNIAVEKFENGSWKVTNIITPSVLIFGPLPNILDYTASLTLQGQQSNPSFEGFGTLSILKVAPEFLLTFSDVTSNQSSAVLGKSIFCMDPVIALMHELTHSLHQLYGINIPSDKRIRPQVSEGFFSQDGPNVQFEELYTFGGLDVEIIPQIERSQLREKALGHYKDIAKRLNNINKTIPSSWISNIDKYKKIFSEKYNFDKDNTGNFVVNIDKFNSLYSDLTNVMSEVVYSSQYNVKNRTHYFSRHYLPVFANILDDNIYTIRDGFNLTNKGFNIENSGQNIERNPALQKLSSESVVDLFTKVCVDNNNNNNNNNNDDDDKHVDAIFTQSYRKVLAQLSARKLLQDILNRQQGERNQEQGAEAAAKEAAAKALQCIKVKNNRLPYVADKDSISQEIFENKIITDETNVQNYSDKFSLDESILDGQVPINPEIVDPLLPNVNMEPLNLPGEEIVFYDDITKYVDYLNSYYYLESQKLSNNVENITLTTSVEEALGYSNKIYTFLPSLAEKVNKGVQAGLFLNWANEVVEDFTTNIMKKDTLDKISDVSVIIPYIGPALNIGNSALRGNFNQAFATAGVAFLLEGFPEFTIPALGVFTFYSSIQEREKIIKTIENCLEQRVKRWKDSYQWMVSNWLSRITTQFNHINYQMYDSLSYQADAIKAKIDLEYKKYSGSDKENIKSQVENLKNSLDVKISEAMNNINKFIRECSVTYLFKNMLPKVIDELNKFDLRTKTELINLIDSHNIILVGEVDRLKAKVNESFENTMPFNIFSYTNNSLLKDIINEYFN

SEQ ID NO: 39 - protein, 916 aa, Artificial Sequence
  source: /note="Description of Artificial Sequence: Synthetic polypeptide"
TWPVKDFNYSDPVNDNDILYLRIPQNKLITTPVKAFMITQNIWVIPERFSSDTNPSLSKPPRPTSKYQSYYDPSYLSTDEQKDTFLKGIIKLFKRINERDIGKKLINYLVVGSPFMGDSSTPEDTFDFTRHTTNIAVEKFENGSWKVTNIITPSVLIFGPLPNILDYTASLTLQGQQSNPSFEGFGTLSILKVAPEFLLTFSDVTSNQSSAVLGKSIFCMDPVIALMHELTHSLHQLYGINIPSDKRIRPQVSEGFFSQDGPNVQFEELYTFGGLDVEIIPQIERSQLREKALGHYKDIAKRLNNINKTIPSSWISNIDKYKKIFSEKYNFDKDNTGNFVVNIDKFNSLYSDLTNVMSEVVYSSQYNVKNRTHYFSRHYLPVFANILDDNIYTIRDGFNLTNKGFNIENSGQNIERNPALQKLSSESVVDLFTKVCVDGIITSKTKSDDDDKSANSNPAMAPRERKAGCKNFFWKTFTSCALAGGGGSGGGGSGGGGSALALQCIKVKNNRLPYVADKDSISQEIFENKIITDETNVQNYSDKFSLDESILDGQVPINPEIVDPLLPNVNMEPLNLPGEEIVFYDDITKYVDYLNSYYYLESQKLSNNVENITLTTSVEEALGYSNKIYTFLPSLAEKVNKGVQAGLFLNWANEVVEDFTTNIMKKDTLDKISDVSVIIPYIGPALNIGNSALRGNFNQAFATAGVAFLLEGFPEFTIPALGVFTFYSSIQEREKIIKTIENCLEQRVKRWKDSYQWMVSNWLSRITTQFNHINYQMYDSLSYQADAIKAKIDLEYKKYSGSDKENIKSQVENLKNSLDVKISEAMNNINKFIRECSVTYLFKNMLPKVIDELNKFDLRTKTELINLIDSHNIILVGEVDRLKAKVNESFENTMPFNIFSYTNNSLLKDIINEYFN

SEQ ID NO: 40 - protein, 902 aa, Artificial Sequence
  source: /note="Description of Artificial Sequence: Synthetic polypeptide"
TWPVKDFNYSDPVNDNDILYLRIPQNKLITTPVKAFMITQNIWVIPERFSSDTNPSLSKPPRPTSKYQSYYDPSYLSTDEQKDTFLKGIIKLFKRINERDIGKKLINYLVVGSPFMGDSSTPEDTFDFTRHTTNIAVEKFENGSWKVTNIITPSVLIFGPLPNILDYTASLTLQGQQSNPSFEGFGTLSILKVAPEFLLTFSDVTSNQSSAVLGKSIFCMDPVIALMHELTHSLHQLYGINIPSDKRIRPQVSEGFFSQDGPNVQFEELYTFGGLDVEIIPQIERSQLREKALGHYKDIAKRLNNINKTIPSSWISNIDKYKKIFSEKYNFDKDNTGNFVVNIDKFNSLYSDLTNVMSEVVYSSQYNVKNRTHYFSRHYLPVFANILDDNIYTIRDGFNLTNKGFNIENSGQNIERNPALQKLSSESVVDLFTKVCVDGIITSKTKSDDDDKAGCKNFFWKTFTSCALAGGGGSGGGGSGGGGSALALQCIKVKNNRLPYVADKDSISQEIFENKIITDETNVQNYSDKFSLDESILDGQVPINPEIVDPLLPNVNMEPLNLPGEEIVFYDDITKYVDYLNSYYYLESQKLSNNVENITLTTSVEEALGYSNKIYTFLPSLAEKVNKGVQAGLFLNWANEVVEDFTTNIMKKDTLDKISDVSVIIPYIGPALNIGNSALRGNFNQAFATAGVAFLLEGFPEFTIPALGVFTFYSSIQEREKIIKTIENCLEQRVKRWKDSYQWMVSNWLSRITTQFNHINYQMYDSLSYQADAIKAKIDLEYKKYSGSDKENIKSQVENLKNSLDVKISEAMNNINKFIRECSVTYLFKNMLPKVIDELNKFDLRTKTELINLIDSHNIILVGEVDRLKAKVNESFENTMPFNIFSYTNNSLLKDIINEYFN

SEQ ID NO: 41 - protein, 710 aa, Artificial Sequence
  source: /note="Description of Artificial Sequence: Synthetic polypeptide"
ESNQPEKNGTATKPENSGNTTSENGQTEPEKKLELRNVSDIELYSQTNGTYRQHVSLDGIPENTDTYFVKVKSSAFKDVYIPVASITEEKRNGQSVYKITAKAEKLQQELENKYVDNFTFYLDKKAKEENTNFTSFSNLVKAINQNPSGTYHLAASLNANEVELGPDERSYIKDTFTGRLIGEKDGKNYAIYNLKKPLFENLSGATVEKLSLKNVAISGKNDIGSLANEATNGTKIKQVHVDGCVDGIITSKTKSDDDDKAGCKNFFWKTFTSCALAGGGGSGGGGSGGGGSALALQCIKIKNEDLTFIAEKNSFSEEPFQDEIVSYNTKNKPLNFNYSLDKIIVDYNLQSKITLPNDRTTPVTKGIPYAPEYKSNAASTIEIHNIDDNTIYQYLYAQKSPTTLQRITMTNSVDDALINSTKIYSYFPSVISKVNQGAQGILFLQWVRDIIDDFTNESSQKTTIDKISDVSTIVPYIGPALNIVKQGYEGNFIGALETTGVVLLLEYIPEITLPVIAALSIAESSTQKEKIIKTIDNFLEKRYEKWIEVYKLVKAKWLGTVNTQFQKRSYQMYRSLEYQVDAIKKIIDYEYKIYSGPDKEQIADEINNLKNKLEEKANKAMININIFMRESSRSFLVNQMINEAKKQLLEFDTQSKNILMQYIKANSKFIGITELKKLESKINKVFSTPIPFSYSKNLDCWVDNEEDIDV

SEQ ID NO: 42 - protein, 918 aa, Artificial Sequence
  source: /note="Description of Artificial Sequence: Synthetic polypeptide"
EFVNKQFNYKDPVNGVDIAYIKIPNAGQMQPVKAFKIHNKIWVIPERDTFTNPEEGDLNPPPEAKQVPVSYYDSTYLSTDNEKDNYLKGVTKLFERIYSTDLGRMLLTSIVRGIPFWGGSTIDTELKVIDTNCINVIQPDGSYRSEELNLVIIGPSADIIQFECKSFGHEVLNLTRNGYGSTQYIRFSPDFTFGFEESLEVDTNPLLGAGKFATDPAVTLAHELIHAGHRLYGIAINPNRVFKVNTNAYYEMSGLEVSFEELRTFGGHDAKFIDSLQENEFRLYYYNKFKDIASTLNKAKSIVGTTASLQYMKNVFKEKYLLSEDTSGKFSVDKLKFDKLYKMLTEIYTEDNFVKFFKVLNRKTYLNFDKAVFKINIVPKVNYTIYDGFNLRNTNLAANFNGQNTEINNMNFTKLKNFTGLFEFYKLLCVDGGGGSADDDDKNDDPPISIDLTFHLLRNMIEMARIENEREQAGLNRKYLDEVALAGGGGSGGGGSGGGGSALVLQCIKVNNWDLFFSPSEDNFTNDLNKGEEITSDTNIEAAEENISLDLIQQYYLTFNFDNEPENISIENLSSDIIGQLELMPNIERFPNGKKYELDKYTMFHYLRAQEFEHGKSRIALTNSVNEALLNPSRVYTFFSSDYVKKVNKATEAAMFLGWVEQLVYDFTDETSEVSTTDKIADITIIIPYIGPALNIGNMLYKDDFVGALIFSGAVILLEFIPEIAIPVLGTFALVSYIANKVLTVQTIDNALSKRNEKWDEVYKYIVTNWLAKVNTQIDLIRKKMKEALENQAEATKAIINYQYNQYTEEEKNNINFNIDDLSSKLNESINKAMININKFLNQCSVSYLMNSMIPYGVKRLEDFDASLKDALLKYIYDNRGTLIGQVDRLKDKVNNTLSTDIPFQLSKYVDNQRLLST

SEQ ID NO: 43 - protein, 926 aa, Artificial Sequence
  source: /note="Description of Artificial Sequence: Synthetic polypeptide"
PVTINNFNYNDPIDNNNIIMMEPPFARGTGRYYKAFKITDRIWIIPERYTFGYKPEDFNKSSGIFNRDVCEYYDPDYLNTNDKKNIFLQTMIKLFNRIKSKPLGEKLLEMIINGIPYLGDRRVPLEEFNTNIASVTVNKLISNPGEVERKKGIFANLIIFGPGPVLNENETIDIGIQNHFASREGFGGIMQMKFCPEYVSVFNNVQENKGASIFNRRGYFSDPALILMHELIHVLHGLYGIKVDDLPIVPNEKKFFMQSTDAIQAEELYTFGGQDPSIITPSTDKSIYDKVLQNFRGIVDRLNKVLVCISDPNININIYKNKFKDKYKFVEDSEGKYSIDVESFDKLYKSLMFGFTETNIAENYKIKTRASYFSDSLPPVKIKNLLDNEIYTIEEGFNISDKDMEKEYRGQNKAINKQAYEEISKEHLAVYKIQMCVDGGGGSGGGGSADDDDKVVSHFNDCPDSHTQFCFHGTCRFLVQEDKPACVCHSGYVGARCEHADLLAALAKRLVLQCIDVDNEDLFFIADKNSFSDDLSKNERIEYNTQSNYIENDFPINELILDTDLISKIELPSENTESLTDFNVDVPVYEKQPAIKKIFTDENTIFQYLYSQTFPLDIRDISLTSSFDDALLFSNKVYSFFSMDYIKTANKVVEAGLFAGWVKQIVNDFVIEANKSNTMDAIADISLIVPYIGLALNVGNETAKGNFENAFEIAGASILLEFIPELLIPVVGAFLLESYIDNKNKIIKTIDNALTKRNEKWSDMYGLIVAQWLSTVNTQFYTIKEGMYKALNYQAQALEEIIKYRYNIYSEKEKSNINIDFNDINSKLNEGINQAIDNINNFINGCSVSYLMKKMIPLAVEKLLDFDNTLKKNLLNYIDENKLYLIGSAEYEKSKVNKYLKTIMPFDLSIYTNDTILIEMFNKYNS

SEQ ID NO: 44 - protein, 940 aa, Artificial Sequence
  source: /note="Description of Artificial Sequence: Synthetic polypeptide"
PVTINNFNYNDPIDNNNIIMMEPPFARGTGRYYKAFKITDRIWIIPERYTFGYKPEDFNKSSGIFNRDVCEYYDPDYLNTNDKKNIFLQTMIKLFNRIKSKPLGEKLLEMIINGIPYLGDRRVPLEEFNTNIASVTVNKLISNPGEVERKKGIFANLIIFGPGPVLNENETIDIGIQNHFASREGFGGIMQMKFCPEYVSVFNNVQENKGASIFNRRGYFSDPALILMHELIHVLHGLYGIKVDDLPIVPNEKKFFMQSTDAIQAEELYTFGGQDPSIITPSTDKSIYDKVLQNFRGIVDRLNKVLVCISDPNININIYKNKFKDKYKFVEDSEGKYSIDVESFDKLYKSLMFGFTETNIAENYKIKTRASYFSDSLPPVKIKNLLDNEIYTIEEGFNISDKDMEKEYRGQNKAINKQAYEEISKEHLAVYKIQMCVDGGGGSGGGGSADDDDKVVSHFNDCPDSHTQFCFHGTCRFLVQEDKPACVCHSGYVGARCEHADLLAALAGGGGSGGGGSGGGGSALVLQCIDVDNEDLFFIADKNSFSDDLSKNERIEYNTQSNYIENDFPINELILDTDLISKIELPSENTESLTDFNVDVPVYEKQPAIKKIFTDENTIFQYLYSQTFPLDIRDISLTSSFDDALLFSNKVYSFFSMDYIKTANKVVEAGLFAGWVKQIVNDFVIEANKSNTMDAIADISLIVPYIGLALNVGNETAKGNFENAFEIAGASILLEFIPELLIPVVGAFLLESYIDNKNKIIKTIDNALTKRNEKWSDMYGLIVAQWLSTVNTQFYTIKEGMYKALNYQAQALEEIIKYRYNIYSEKEKSNINIDFNDINSKLNEGINQAIDNINNFINGCSVSYLMKKMIPLAVEKLLDFDNTLKKNLLNYIDENKLYLIGSAEYEKSKVNKYLKTIMPFDLSIYTNDTILIEMFNKYNS

SEQ ID NO: 45 - protein, 864 aa, Artificial Sequence
  source: /note="Description of Artificial Sequence: Synthetic polypeptide"
EFVNKQFNYKDPVNGVDIAYIKIPNAGQMQPVKAFKIHNKIWVIPERDTFTNPEEGDLNPPPEAKQVPVSYYDSTYLSTDNEKDNYLKGVTKLFERIYSTDLGRMLLTSIVRGIPFWGGSTIDTELKVIDTNCINVIQPDGSYRSEELNLVIIGPSADIIQFECKSFGHEVLNLTRNGYGSTQYIRFSPDFTFGFEESLEVDTNPLLGAGKFATDPAVTLAHELIHAGHRLYGIAINPNRVFKVNTNAYYEMSGLEVSFEELRTFGGHDAKFIDSLQENEFRLYYYNKFKDIASTLNKAKSIVGTTASLQYMKNVFKEKYLLSEDTSGKFSVDKLKFDKLYKMLTEIYTEDNFVKFFKVLNRKTYLNFDKAVFKINIVPKVNYTIYDGFNLRNTNLAANFNGQNTEINNMNFTKLKNFTGLFEFYKLLCVDGIITSKTKSDDDDKNKALNLQCIKVNNWDLFFSPSEDNFTNDLNKGEEITSDTNIEAAEENISLDLIQQYYLTFNFDNEPENISIENLSSDIIGQLELMPNIERFPNGKKYELDKYTMFHYLRAQEFEHGKSRIALTNSVNEALLNPSRVYTFFSSDYVKKVNKATEAAMFLGWVEQLVYDFTDETSEVSTTDKIADITIIIPYIGPALNIGNMLYKDDFVGALIFSGAVILLEFIPEIAIPVLGTFALVSYIANKVLTVQTIDNALSKRNEKWDEVYKYIVTNWLAKVNTQIDLIRKKMKEALENQAEATKAIINYQYNQYTEEEKNNINFNIDDLSSKLNESINKAMININKFLNQCSVSYLMNSMIPYGVKRLEDFDASLKDALLKYIYDNRGTLIGQVDRLKDKVNNTLSTDIPFQLSKYVDNQRLLST

SEQ ID NO: 46 - protein, 869 aa, Artificial Sequence
  source: /note="Description of Artificial Sequence: Synthetic polypeptide"
PVTINNFNYNDPIDNNNIIMMEPPFARGTGRYYKAFKITDRIWIIPERYTFGYKPEDFNKSSGIFNRDVCEYYDPDYLNTNDKKNIFLQTMIKLFNRIKSKPLGEKLLEMIINGIPYLGDRRVPLEEFNTNIASVTVNKLISNPGEVERKKGIFANLIIFGPGPVLNENETIDIGIQNHFASREGFGGIMQMKFCPEYVSVFNNVQENKGASIFNRRGYFSDPALILMHELIHVLHGLYGIKVDDLPIVPNEKKFFMQSTDAIQAEELYTFGGQDPSIITPSTDKSIYDKVLQNFRGIVDRLNKVLVCISDPNININIYKNKFKDKYKFVEDSEGKYSIDVESFDKLYKSLMFGFTETNIAENYKIKTRASYFSDSLPPVKIKNLLDNEIYTIEEGFNISDKDMEKEYRGQNKAINKQAYEEISKEHLAVYKIQMCVDEEKLYDDDDKDRWGSSLQCIDVDNEDLFFIADKNSFSDDLSKNERIEYNTQSNYIENDFPINELILDTDLISKIELPSENTESLTDFNVDVPVYEKQPAIKKIFTDENTIFQYLYSQTFPLDIRDISLTSSFDDALLFSNKVYSFFSMDYIKTANKVVEAGLFAGWVKQIVNDFVIEANKSNTMDAIADISLIVPYIGLALNVGNETAKGNFENAFEIAGASILLEFIPELLIPVVGAFLLESYIDNKNKIIKTIDNALTKRNEKWSDMYGLIVAQWLSTVNTQFYTIKEGMYKALNYQAQALEEIIKYRYNIYSEKEKSNINIDFNDINSKLNEGINQAIDNINNFINGCSVSYLMKKMIPLAVEKLLDFDNTLKKNLLNYIDENKLYLIGSAEYEKSKVNKYLKTIMPFDLSIYTNDTILIEMFNKYNS

SEQ ID NO: 47 - protein, 865 aa, Artificial Sequence
  source: /note="Description of Artificial Sequence: Synthetic polypeptide"
PITINNFNYSDPVDNKNILYLDTHLNTLANEPEKAFRITGNIWVIPDRFSRNSNPNLNKPPRVTSPKSGYYDPNYLSTDSDKDTFLKEIIKLFKRINSREIGEELIYRLSTDIPFPGNNNTPINTFDFDVDFNSVDVKTRQGNNWVKTGSINPSVIITGPRENIIDPETSTFKLTNNTFAAQEGFGALSIISISPRFMLTYSNATNDVGEGRFSKSEFCMDPILILMHELNHAMHNLYGIAIPNDQTISSVTSNIFYSQYNVKLEYAEIYAFGGPTIDLIPKSARKYFEEKALDYYRSIAKRLNSITTANPSSFNKYIGEYKQKLIRKYRFVVESSGEVTVNRNKFVELYNELTQIFTEFNYAKIYNVQNRKIYLSNVYTPVTANILDDNVYDIQNGFNIPKSNLNVLFMGQNLSRNPALRKVNPENMLYLFTKFCVDAIDGRSLYNKTLQCRELLVKNTDLPFIGDISDVKTDIFLRKDINEETEVIYYPDNVSVDQVILSKNTSEHGQLDLLYPSIDSESEILPGENQVFYDNRTQNVDYLNSYYYLESQKLSDNVEDFTFTRSIEEALDNSAKVYTYFPTLANKVNAGVQGGLFLMWANDVVEDFTTNILRKDTLDKISDVSAIIPYIGPALNISNSVRRGNFTEAFAVTGVTILLEAFPEFTIPALGAFVIYSKVQERNEIIKTIDNCLEQRIKRWKDSYEWMMGTWLSRIITQFNNISYQMYDSLNYQAGAIKAKIDLEYKKYSGSDKENIKSQVENLKNSLDVKISEAMNNINKFIRECSVTYLFKNMLPKVIDELNEFDRNTKAKLINLIDSHNIILVGEVDKLKAKVNNSFQNTIPFNIFSYTNNSLLKDIINEYFN

SEQ ID NO: 48 - protein, 871 aa, Artificial Sequence
  source: /note="Description of Artificial Sequence: Synthetic polypeptide"
TWPVKDFNYSDPVNDNDILYLRIPQNKLITTPVKAFMITQNIWVIPERFSSDTNPSLSKPPRPTSKYQSYYDPSYLSTDEQKDTFLKGIIKLFKRINERDIGKKLINYLVVGSPFMGDSSTPEDTFDFTRHTTNIAVEKFENGSWKVTNIITPSVLIFGPLPNILDYTASLTLQGQQSNPSFEGFGTLSILKVAPEFLLTFSDVTSNQSSAVLGKSIFCMDPVIALMHELTHSLHQLYGINIPSDKRIRPQVSEGFFSQDGPNVQFEELYTFGGLDVEIIPQIERSQLREKALGHYKDIAKRLNNINKTIPSSWISNIDKYKKIFSEKYNFDKDNTGNFVVNIDKFNSLYSDLTNVMSEVVYSSQYNVKNRTHYFSRHYLPVFANILDDNIYTIRDGFNLTNKGFNIENSGQNIERNPALQKLSSESVVDLFTKVCVDKSEEKLYDDDDKDRWGSSLQCIKVKNNRLPYVADKDSISQEIFENKIITDETNVQNYSDKFSLDESILDGQVPINPEIVDPLLPNVNMEPLNLPGEEIVFYDDITKYVDYLNSYYYLESQKLSNNVENITLTTSVEEALGYSNKIYTFLPSLAEKVNKGVQAGLFLNWANEVVEDFTTNIMKKDTLDKISDVSVIIPYIGPALNIGNSALRGNFNQAFATAGVAFLLEGFPEFTIPALGVFTFYSSIQEREKIIKTIENCLEQRVKRWKDSYQWMVSNWLSRITTQFNHINYQMYDSLSYQADAIKAKIDLEYKKYSGSDKENIKSQVENLKNSLDVKISEAMNNINKFIRECSVTYLFKNMLPKVIDELNKFDLRTKTELINLIDSHNIILVGEVDRLKAKVNESFENTMPFNIFSYTNNSLLKDIINEYFN

SEQ ID NO: 49 - protein, 680 aa, Artificial Sequence
  source: /note="Description of Artificial Sequence: Synthetic polypeptide"
ESNQPEKNGTATKPENSGNTTSENGQTEPEKKLELRNVSDIELYSQTNGTYRQHVSLDGIPENTDTYFVKVKSSAFKDVYIPVASITEEKRNGQSVYKITAKAEKLQQELENKYVDNFTFYLDKKAKEENTNFTSFSNLVKAINQNPSGTYHLAASLNANEVELGPDERSYIKDTFTGRLIGEKDGKNYAIYNLKKPLFENLSGATVEKLSLKNVAISGKNDIGSLANEATNGTKIKQVHVDGCVDGIITSKTKSDDDDKNKALNLQCIKIKNEDLTFIAEKNSFSEEPFQDEIVSYNTKNKPLNFNYSLDKIIVDYNLQSKITLPNDRTTPVTKGIPYAPEYKSNAASTIEIHNIDDNTIYQYLYAQKSPTTLQRITMTNSVDDALINSTKIYSYFPSVISKVNQGAQGILFLQWVRDIIDDFTNESSQKTTIDKISDVSTIVPYIGPALNIVKQGYEGNFIGALETTGVVLLLEYIPEITLPVIAALSIAESSTQKEKIIKTIDNFLEKRYEKWIEVYKLVKAKWLGTVNTQFQKRSYQMYRSLEYQVDAIKKIIDYEYKIYSGPDKEQIADEINNLKNKLEEKANKAMININIFMRESSRSFLVNQMINEAKKQLLEFDTQSKNILMQYIKANSKFIGITELKKLESKINKVFSTPIPFSYSKNLDCWVDNEEDIDV

SEQ ID NO: 50 - protein, 9 aa, Artificial Sequence
  source: /note="Description of Artificial Sequence: Synthetic peptide"
  MOD_RES (2)..(2): D-Phe
  MOD_RES (5)..(5): D-Trp
  misc_feature (9)..(9): /note="C-terminal-alcohol"
CFCFWKTCT

SEQ ID NO: 51 - protein, 30 aa, Artificial Sequence
  source: /note="Description of Artificial Sequence: Synthetic polypeptide"
  MOD_RES (27)..(27): Norleucine
HADAIFTNSYRKVLGQLSARKLLQDILSRC

SEQ ID NO: 52 - protein, 30 aa, Artificial Sequence
  source: /note="Description of Artificial Sequence: Synthetic polypeptide"
  MOD_RES (1)..(1): PhAc-Tyr
  MOD_RES (2)..(2): D-Arg
  MOD_RES (6)..(6): Phe(4-Cl)
  MOD_RES (9)..(9): Homoarginine
  MOD_RES (10)..(10): Tyr(Me)
  MOD_RES (15)..(15): Alpha-aminobutyric acid
  MOD_RES (27)..(27): Norleucine
  MOD_RES (28)..(28): D-Arg
  MOD_RES (29)..(29): Homoarginine
YRDAIFTARYHKVLXQLSAHKLLQDILRRC

SEQ ID NO: 53 - protein, 893 aa, Artificial Sequence
  source: /note="Description of Artificial Sequence: Synthetic polypeptide"
TWPVKDFNYSDPVNDNDILYLRIPQNKLITTPVKAFMITQNIWVIPERFSSDTNPSLSKPPRPTSKYQSYYDPSYLSTDEQKDTFLKGIIKLFKRINERDIGKKLINYLVVGSPFMGDSSTPEDTFDFTRHTTNIAVEKFENGSWKVTNIITPSVLIFGPLPNILDYTASLTLQGQQSNPSFEGFGTLSILKVAPEFLLTFSDVTSNQSSAVLGKSIFCMDPVIALMHELTHSLHQLYGINIPSDKRIRPQVSEGFFSQDGPNVQFEELYTFGGLDVEIIPQIERSQLREKALGHYKDIAKRLNNINKTIPSSWISNIDKYKKIFSEKYNFDKDNTGNFVVNIDKFNSLYSDLTNVMSEVVYSSQYNVKNRTHYFSRHYLPVFANILDDNIYTIRDGFNLTNKGFNIENSGQNIERNPALQKLSSESVVDLFTKVCVDGIITSKTKSDDDDKDFDMLRCMLGRVYRPCWQVALAKRLVLQCIKVKNNRLPYVADKDSISQEIFENKIITDETNVQNYSDKFSLDESILDGQVPINPEIVDPLLPNVNMEPLNLPGEEIVFYDDITKYVDYLNSYYYLESQKLSNNVENITLTTSVEEALGYSNKIYTFLPSLAEKVNKGVQAGLFLNWANEVVEDFTTNIMKKDTLDKISDVSVIIPYIGPALNIGNSALRGNFNQAFATAGVAFLLEGFPEFTIPALGVFTFYSSIQEREKIIKTIENCLEQRVKRWKDSYQWMVSNWLSRITTQFNHINYQMYDSLSYQADAIKAKIDLEYKKYSGSDKENIKSQVENLKNSLDVKISEAMNNINKFIRECSVTYLFKNMLPKVIDELNKFDLRTKTELINLIDSHNIILVGEVDRLKAKVNESFENTMPFNIFSYTNNSLLKDIINEYFN

SEQ ID NO: 54 - protein, 902 aa, Artificial Sequence
  source: /note="Description of Artificial Sequence: Synthetic polypeptide"
TWPVKDFNYSDPVNDNDILYLRIPQNKLITTPVKAFMITQNIWVIPERFSSDTNPSLSKPPRPTSKYQSYYDPSYLSTDEQKDTFLKGIIKLFKRINERDIGKKLINYLVVGSPFMGDSSTPEDTFDFTRHTTNIAVEKFENGSWKVTNIITPSVLIFGPLPNILDYTASLTLQGQQSNPSFEGFGTLSILKVAPEFLLTFSDVTSNQSSAVLGKSIFCMDPVIALMHELTHSLHQLYGINIPSDKRIRPQVSEGFFSQDGPNVQFEELYTFGGLDVEIIPQIERSQLREKALGHYKDIAKRLNNINKTIPSSWISNIDKYKKIFSEKYNFDKDNTGNFVVNIDKFNSLYSDLTNVMSEVVYSSQYNVKNRTHYFSRHYLPVFANILDDNIYTIRDGFNLTNKGFNIENSGQNIERNPALQKLSSESVVDLFTKVCVDKSEEKLYDDDDKDRWGSSLQCIKVKNNRLPYVADKDSISQEIFENKIITDETNVQNYSDKFSLDESILDGQVPINPEIVDPLLPNVNMEPLNLPGEEIVFYDDITKYVDYLNSYYYLESQKLSNNVENITLTTSVEEALGYSNKIYTFLPSLAEKVNKGVQAGLFLNWANEVVEDFTTNIMKKDTLDKISDVSVIIPYIGPALNIGNSALRGNFNQAFATAGVAFLLEGFPEFTIPALGVFTFYSSIQEREKIIKTIENCLEQRVKRWKDSYQWMVSNWLSRITTQFNHINYQMYDSLSYQADAIKAKIDLEYKKYSGSDKENIKSQVENLKNSLDVKISEAMNNINKFIRECSVTYLFKNMLPKVIDELNKFDLRTKTELINLIDSHNIILVGEVDRLKAKVNESFENTMPFNIFSYTNNSLLKDIINEYFNLEGGGGSGGGGSGGGGSALVYNWNSFGLRFG

SEQ ID NO: 55 - protein, 905 aa, Artificial Sequence
  source: /note="Description of Artificial Sequence: Synthetic polypeptide"
EFVNKQFNYKDPVNGVDIAYIKIPNAGQMQPVKAFKIHNKIWVIPERDTFTNPEEGDLNPPPEAKQVPVSYYDSTYLSTDNEKDNYLKGVTKLFERIYSTDLGRMLLTSIVRGIPFWGGSTIDTELKVIDTNCINVIQPDGSYRSEELNLVIIGPSADIIQFECKSFGHEVLNLTRNGYGSTQYIRFSPDFTFGFEESLEVDTNPLLGAGKFATDPAVTLAHELIHAGHRLYGIAINPNRVFKVNTNAYYEMSGLEVSFEELRTFGGHDAKFIDSLQENEFRLYYYNKFKDIASTLNKAKSIVGTTASLQYMKNVFKEKYLLSEDTSGKFSVDKLKFDKLYKMLTEIYTEDNFVKFFKVLNRKTYLNFDKAVFKINIVPKVNYTIYDGFNLRNTNLAANFNGQNTEINNMNFTKLKNFTGLFEFYKLLCVDGIITSKTKSDDDDKNKALNLQCIKVNNWDLFFSPSEDNFTNDLNKGEEITSDTNIEAAEENISLDLIQQYYLTFNFDNEPENISIENLSSDIIGQLELMPNIERFPNGKKYELDKYTMFHYLRAQEFEHGKSRIALTNSVNEALLNPSRVYTFFSSDYVKKVNKATEAAMFLGWVEQLVYDFTDETSEVSTTDKIADITIIIPYIGPALNIGNMLYKDDFVGALIFSGAVILLEFIPEIAIPVLGTFALVSYIANKVLTVQTIDNALSKRNEKWDEVYKYIVTNWLAKVNTQIDLIRKKMKEALENQAEATKAIINYQYNQYTEEEKNNINFNIDDLSSKLNESINKAMININKFLNQCSVSYLMNSMIPYGVKRLEDFDASLKDALLKYIYDNRGTLIGQVDRLKDKVNNTLSTDIPFQLSKYVDNQRLLSTLEGGGGSGGGGSGGGGSALVTPDINPAWYASRGIRPVGRFG

SEQ ID NO: 56 - protein, 927 aa, Artificial Sequence
  source: /note="Description of Artificial Sequence: Synthetic polypeptide"
PITINNFNYSDPVDNKNILYLDTHLNTLANEPEKAFRITGNIWVIPDRFSRNSNPNLNKPPRVTSPKSGYYDPNYLSTDSDKDTFLKEIIKLFKRINSREIGEELIYRLSTDIPFPGNNNTPINTFDFDVDFNSVDVKTRQGNNWVKTGSINPSVIITGPRENIIDPETSTFKLTNNTFAAQEGFGALSIISISPRFMLTYSNATNDVGEGRFSKSEFCMDPILILMHELNHAMHNLYGIAIPNDQTISSVTSNIFYSQYNVKLEYAEIYAFGGPTIDLIPKSARKYFEEKALDYYRSIAKRLNSITTANPSSFNKYIGEYKQKLIRKYRFVVESSGEVTVNRNKFVELYNELTQIFTEFNYAKIYNVQNRKIYLSNVYTPVTANILDDNVYDIQNGFNIPKSNLNVLFMGQNLSRNPALRKVNPENMLYLFTKFCVDGGGGSADDDDKSEEPPISLDLTFHLLREVLEMARAEQLAQQAHSNRKLMEIIALAGGGGSGGGGSGGGGSALVLQCRELLVKNTDLPFIGDISDVKTDIFLRKDINEETEVIYYPDNVSVDQVILSKNTSEHGQLDLLYPSIDSESEILPGENQVFYDNRTQNVDYLNSYYYLESQKLSDNVEDFTFTRSIEEALDNSAKVYTYFPTLANKVNAGVQGGLFLMWANDVVEDFTTNILRKDTLDKISDVSAIIPYIGPALNISNSVRRGNFTEAFAVTGVTILLEAFPEFTIPALGAFVIYSKVQERNEIIKTIDNCLEQRIKRWKDSYEWMMGTWLSRIITQFNNISYQMYDSLNYQAGAIKAKIDLEYKKYSGSDKENIKSQVENLKNSLDVKISEAMNNINKFIRECSVTYLFKNMLPKVIDELNEFDRNTKAKLINLIDSHNIILVGEVDKLKAKVNNSFQNTIPFNIFSYTNNSLLKDIINEYFN

SEQ ID NO: 57 - protein, 915 aa, Artificial Sequence
  source: /note="Description of Artificial Sequence: Synthetic polypeptide"
TWPVKDFNYSDPVNDNDILYLRIPQNKLITTPVKAFMITQNIWVIPERFSSDTNPSLSKPPRPTSKYQSYYDPSYLSTDEQKDTFLKGIIKLFKRINERDIGKKLINYLVVGSPFMGDSSTPEDTFDFTRHTTNIAVEKFENGSWKVTNIITPSVLIFGPLPNILDYTASLTLQGQQSNPSFEGFGTLSILKVAPEFLLTFSDVTSNQSSAVLGKSIFCMDPVIALMHELTHSLHQLYGINIPSDKRIRPQVSEGFFSQDGPNVQFEELYTFGGLDVEIIPQIERSQLREKALGHYKDIAKRLNNINKTIPSSWISNIDKYKKIFSEKYNFDKDNTGNFVVNIDKFNSLYSDLTNVMSEVVYSSQYNVKNRTHYFSRHYLPVFANILDDNIYTIRDGFNLTNKGFNIENSGQNIERNPALQKLSSESVVDLFTKVCVDGIITSKTKSDDDDKYADAIFTNSYRKVLGQLSARKLLQDIMALAGGGGSGGGGSGGGGSALALQCIKVKNNRLPYVADKDSISQEIFENKIITDETNVQNYSDKFSLDESILDGQVPINPEIVDPLLPNVNMEPLNLPGEEIVFYDDITKYVDYLNSYYYLESQKLSNNVENITLTTSVEEALGYSNKIYTFLPSLAEKVNKGVQAGLFLNWANEVVEDFTTNIMKKDTLDKISDVSVIIPYIGPALNIGNSALRGNFNQAFATAGVAFLLEGFPEFTIPALGVFTFYSSIQEREKIIKTIENCLEQRVKRWKDSYQWMVSNWLSRITTQFNHINYQMYDSLSYQADAIKAKIDLEYKKYSGSDKENIKSQVENLKNSLDVKISEAMNNINKFIRECSVTYLFKNMLPKVIDELNKFDLRTKTELINLIDSHNIILVGEVDRLKAKVNESFENTMPFNIFSYTNNSLLKDIINEYFN

SEQ ID NO: 58 - protein, 916 aa, Artificial Sequence
  source: /note="Description of Artificial Sequence: Synthetic polypeptide"
TWPVKDFNYSDPVNDNDILYLRIPQNKLITTPVKAFMITQNIWVIPERFSSDTNPSLSKPPRPTSKYQSYYDPSYLSTDEQKDTFLKGIIKLFKRINERDIGKKLINYLVVGSPFMGDSSTPEDTFDFTRHTTNIAVEKFENGSWKVTNIITPSVLIFGPLPNILDYTASLTLQGQQSNPSFEGFGTLSILKVAPEFLLTFSDVTSNQSSAVLGKSIFCMDPVIALMHELTHSLHQLYGINIPSDKRIRPQVSEGFFSQDGPNVQFEELYTFGGLDVEIIPQIERSQLREKALGHYKDIAKRLNNINKTIPSSWISNIDKYKKIFSEKYNFDKDNTGNFVVNIDKFNSLYSDLTNVMSEVVYSSQYNVKNRTHYFSRHYLPVFANILDDNIYTIRDGFNLTNKGFNIENSGQNIERNPALQKLSSESVVDLFTKVCVDGIITSKTKSDDDDKYADAIFTNSYRKVLGQLSARKLLQDIMSALAGGGGSGGGGSGGGGSALALQCIKVKNNRLPYVADKDSISQEIFENKIITDETNVQNYSDKFSLDESILDGQVPINPEIVDPLLPNVNMEPLNLPGEEIVFYDDITKYVDYLNSYYYLESQKLSNNVENITLTTSVEEALGYSNKIYTFLPSLAEKVNKGVQAGLFLNWANEVVEDFTTNIMKKDTLDKISDVSVIIPYIGPALNIGNSALRGNFNQAFATAGVAFLLEGFPEFTIPALGVFTFYSSIQEREKIIKTIENCLEQRVKRWKDSYQWMVSNWLSRITTQFNHINYQMYDSLSYQADAIKAKIDLEYKKYSGSDKENIKSQVENLKNSLDVKISEAMNNINKFIRECSVTYLFKNMLPKVIDELNKFDLRTKTELINLIDSHNIILVGEVDRLKAKVNESFENTMPFNIFSYTNNSLLKDIINEYFN

SEQ ID NO: 59 - protein, 917 aa, Artificial Sequence
  source: /note="Description of Artificial Sequence: Synthetic polypeptide"
TWPVKDFNYSDPVNDNDILYLRIPQNKLITTPVKAFMITQNIWVIPERFSSDTNPSLSKPPRPTSKYQSYYDPSYLSTDEQKDTFLKGIIKLFKRINERDIGKKLINYLVVGSPFMGDSSTPEDTFDFTRHTTNIAVEKFENGSWKVTNIITPSVLIFGPLPNILDYTASLTLQGQQSNPSFEGFGTLSILKVAPEFLLTFSDVTSNQSSAVLGKSIFCMDPVIALMHELTHSLHQLYGINIPSDKRIRPQVSEGFFSQDGPNVQFEELYTFGGLDVEIIPQIERSQLREKALGHYKDIAKRLNNINKTIPSSWISNIDKYKKIFSEKYNFDKDNTGNFVVNIDKFNSLYSDLTNVMSEVVYSSQYNVKNRTHYFSRHYLPVFANILDDNIYTIRDGFNLTNKGFNIENSGQNIERNPALQKLSSESVVDLFTKVCVDGIITSKTKSDDDDKYADAIFTNSYRKVLGQLSARKLLQDIMSRALAGGGGSGGGGSGGGGSALALQCIKVKNNRLPYVADKDSISQEIFENKIITDETNVQNYSDKFSLDESILDGQVPINPEIVDPLLPNVNMEPLNLPGEEIVFYDDITKYVDYLNSYYYLESQKLSNNVENITLTTSVEEALGYSNKIYTFLPSLAEKVNKGVQAGLFLNWANEVVEDFTTNIMKKDTLDKISDVSVIIPYIGPALNIGNSALRGNFNQAFATAGVAFLLEGFPEFTIPALGVFTFYSSIQEREKIIKTIENCLEQRVKRWKDSYQWMVSNWLSRITTQFNHINYQMYDSLSYQADAIKAKIDLEYKKYSGSDKENIKSQVENLKNSLDVKISEAMNNINKFIRECSVTYLFKNMLPKVIDELNKFDLRTKTELINLIDSHNIILVGEVDRLKAKVNESFENTMPFNIFSYTNNSLLKDIINEYFN

SEQ ID NO: 60 - protein, 932 aa, Artificial Sequence
  source: /note="Description of Artificial Sequence: Synthetic polypeptide"
TWPVKDFNYSDPVNDNDILYLRIPQNKLITTPVKAFMITQNIWVIPERFSSDTNPSLSKPPRPTSKYQSYYDPSYLSTDEQKDTFLKGIIKLFKRINERDIGKKLINYLVVGSPFMGDSSTPEDTFDFTRHTTNIAVEKFENGSWKVTNIITPSVLIFGPLPNILDYTASLTLQGQQSNPSFEGFGTLSILKVAPEFLLTFSDVTSNQSSAVLGKSIFCMDPVIALMHELTHSLHQLYGINIPSDKRIRPQVSEGFFSQDGPNVQFEELYTFGGLDVEIIPQIERSQLREKALGHYKDIAKRLNNINKTIPSSWISNIDKYKKIFSEKYNFDKDNTGNFVVNIDKFNSLYSDLTNVMSEVVYSSQYNVKNRTHYFSRHYLPVFANILDDNIYTIRDGFNLTNKGFNIENSGQNIERNPALQKLSSESVVDLFTKVCVDGIITSKTKSDDDDKYADAIFTNSYRKVLGQLSARKLLQDIMSRQQGESNQERGARARLALAGGGGSGGGGSGGGGSALALQCIKVKNNRLPYVADKDSISQEIFENKIITDETNVQNYSDKFSLDESILDGQVPINPEIVDPLLPNVNMEPLNLPGEEIVFYDDITKYVDYLNSYYYLESQKLSNNVENITLTTSVEEALGYSNKIYTFLPSLAEKVNKGVQAGLFLNWANEVVEDFTTNIMKKDTLDKISDVSVIIPYIGPALNIGNSALRGNFNQAFATAGVAFLLEGFPEFTIPALGVFTFYSSIQEREKIIKTIENCLEQRVKRWKDSYQWMVSNWLSRITTQFNHINYQMYDSLSYQADAIKAKIDLEYKKYSGSDKENIKSQVENLKNSLDVKISEAMNNINKFIRECSVTYLFKNMLPKVIDELNKFDLRTKTELINLIDSHNIILVGEVDRLKAKVNESFENTMPFNIFSYTNNSLLKDIINEYFN

SEQ ID NO: 61 - protein, 927 aa, Artificial Sequence
  source: /note="Description of Artificial Sequence: Synthetic polypeptide"
TWPVKDFNYSDPVNDNDILYLRIPQNKLITTPVKAFMITQNIWVIPERFSSDTNPSLSKPPRPTSKYQSYYDPSYLSTDEQKDTFLKGIIKLFKRINERDIGKKLINYLVVGSPFMGDSSTPEDTFDFTRHTTNIAVEKFENGSWKVTNIITPSVLIFGPLPNILDYTASLTLQGQQSNPSFEGFGTLSILKVAPEFLLTFSDVTSNQSSAVLGKSIFCMDPVIALMHELTHSLHQLYGINIPSDKRIRPQVSEGFFSQDGPNVQFEELYTFGGLDVEIIPQIERSQLREKALGHYKDIAKRLNNINKTIPSSWISNIDKYKKIFSEKYNFDKDNTGNFVVNIDKFNSLYSDLTNVMSEVVYSSQYNVKNRTHYFSRHYLPVFANILDDNIYTIRDGFNLTNKGFNIENSGQNIERNPALQKLSSESVVDLFTKVCVDGIITSKTKSDDDDKYADAIFTNSYRKVLGQLSARKLLQDIMSRQQGESNQERGALAGGGGSGGGGSGGGGSALALQCIKVKNNRLPYVADKDSISQEIFENKIITDETNVQNYSDKFSLDESILDGQVPINPEIVDPLLPNVNMEPLNLPGEEIVFYDDITKYVDYLNSYYYLESQKLSNNVENITLTTSVEEALGYSNKIYTFLPSLAEKVNKGVQAGLFLNWANEVVEDFTTNIMKKDTLDKISDVSVIIPYIGPALNIGNSALRGNFNQAFATAGVAFLLEGFPEFTIPALGVFTFYSSIQEREKIIKTIENCLEQRVKRWKDSYQWMVSNWLSRITTQFNHINYQMYDSLSYQADAIKAKIDLEYKKYSGSDKENIKSQVENLKNSLDVKISEAMNNINKFIRECSVTYLFKNMLPKVIDELNKFDLRTKTELINLIDSHNIILVGEVDRLKAKVNESFENTMPFNIFSYTNNSLLKDIINEYFN

SEQ ID NO: 62 - protein, 917 aa, Artificial Sequence
  source: /note="Description of Artificial Sequence: Synthetic polypeptide"
TWPVKDFNYSDPVNDNDILYLRIPQNKLITTPVKAFMITQNIWVIPERFSSDTNPSLSKPPRPTSKYQSYYDPSYLSTDEQKDTFLKGIIKLFKRINERDIGKKLINYLVVGSPFMGDSSTPEDTFDFTRHTTNIAVEKFENGSWKVTNIITPSVLIFGPLPNILDYTASLTLQGQQSNPSFEGFGTLSILKVAPEFLLTFSDVTSNQSSAVLGKSIFCMDPVIALMHELTHSLHQLYGINIPSDKRIRPQVSEGFFSQDGPNVQFEELYTFGGLDVEIIPQIERSQLREKALGHYKDIAKRLNNINKTIPSSWISNIDKYKKIFSEKYNFDKDNTGNFVVNIDKFNSLYSDLTNVMSEVVYSSQYNVKNRTHYFSRHYLPVFANILDDNIYTIRDGFNLTNKGFNIENSGQNIERNPALQKLSSESVVDLFTKVCVDGIITSKTKSDDDDKYADAIFTNAYRKVLGQLSARKLLQDIMSRALAGGGGSGGGGSGGGGSALALQCIKVKNNRLPYVADKDSISQEIFENKIITDETNVQNYSDKFSLDESILDGQVPINPEIVDPLLPNVNMEPLNLPGEEIVFYDDITKYVDYLNSYYYLESQKLSNNVENITLTTSVEEALGYSNKIYTFLPSLAEKVNKGVQAGLFLNWANEVVEDFTTNIMKKDTLDKISDVSVIIPYIGPALNIGNSALRGNFNQAFATAGVAFLLEGFPEFTIPALGVFTFYSSIQEREKIIKTIENCLEQRVKRWKDSYQWMVSNWLSRITTQFNHINYQMYDSLSYQADAIKAKIDLEYKKYSGSDKENIKSQVENLKNSLDVKISEAMNNINKFIRECSVTYLFKNMLPKVIDELNKFDLRTKTELINLIDSHNIILVGEVDRLKAKVNESFENTMPFNIFSYTNNSLLKDIINEYFN

SEQ ID NO: 63 - protein, 917 aa, Artificial Sequence
  source: /note="Description of Artificial Sequence: Synthetic polypeptide"
TWPVKDFNYSDPVNDNDILYLRIPQNKLITTPVKAFMITQNIWVIPERFSSDTNPSLSKPPRPTSKYQSYYDPSYLSTDEQKDTFLKGIIKLFKRINERDIGKKLINYLVVGSPFMGDSSTPEDTFDFTRHTTNIAVEKFENGSWKVTNIITPSVLIFGPLPNILDYTASLTLQGQQSNPSFEGFGTLSILKVAPEFLLTFSDVTSNQSSAVLGKSIFCMDPVIALMHELTHSLHQLYGINIPSDKRIRPQVSEGFFSQDGPNVQFEELYTFGGLDVEIIPQIERSQLREKALGHYKDIAKRLNNINKTIPSSWISNIDKYKKIFSEKYNFDKDNTGNFVVNIDKFNSLYSDLTNVMSEVVYSSQYNVKNRTHYFSRHYLPVFANILDDNIYTIRDGFNLTNKGFNIENSGQNIERNPALQKLSSESVVDLFTKVCVDGIITSKTKSDDDDKYADAIFTNSYRKVLGQLSARKALQDIMSRALAGGGGSGGGGSGGGGSALALQCIKVKNNRLPYVADKDSISQEIFENKIITDETNVQNYSDKFSLDESILDGQVPINPEIVDPLLPNVNMEPLNLPGEEIVFYDDITKYVDYLNSYYYLESQKLSNNVENITLTTSVEEALGYSNKIYTFLPSLAEKVNKGVQAGLFLNWANEVVEDFTTNIMKKDTLDKISDVSVIIPYIGPALNIGNSALRGNFNQAFATAGVAFLLEGFPEFTIPALGVFTFYSSIQEREKIIKTIENCLEQRVKRWKDSYQWMVSNWLSRITTQFNHINYQMYDSLSYQADAIKAKIDLEYKKYSGSDKENIKSQVENLKNSLDVKISEAMNNINKFIRECSVTYLFKNMLPKVIDELNKFDLRTKTELINLIDSHNIILVGEVDRLKAKVNESFENTMPFNIFSYTNNSLLKDIINEYFN

SEQ ID NO: 64 - protein, 917 aa, Artificial Sequence
  source: /note="Description of Artificial Sequence: Synthetic polypeptide"
TWPVKDFNYSDPVNDNDILYLRIPQNKLITTPVKAFMITQNIWVIPERFSSDTNPSLSKPPRPTSKYQSYYDPSYLSTDEQKDTFLKGIIKLFKRINERDIGKKLINYLVVGSPFMGDSSTPEDTFDFTRHTTNIAVEKFENGSWKVTNIITPSVLIFGPLPNILDYTASLTLQGQQSNPSFEGFGTLSILKVAPEFLLTFSDVTSNQSSAVLGKSIFCMDPVIALMHELTHSLHQLYGINIPSDKRIRPQVSEGFFSQDGPNVQFEELYTFGGLDVEIIPQIERSQLREKALGHYKDIAKRLNNINKTIPSSWISNIDKYKKIFSEKYNFDKDNTGNFVVNIDKFNSLYSDLTNVMSEVVYSSQYNVKNRTHYFSRHYLPVFANILDDNIYTIRDGFNLTNKGFNIENSGQNIERNPALQKLSSESVVDLFTKVCVDGIITSKTKSDDDDKYADAIFTASYKKVLGQLSARKLLQDIMSRALAGGGGSGGGGSGGGGSALALQCIKVKNNRLPYVADKDSISQEIFENKIITDETNVQNYSDKFSLDESILDGQVPINPEIVDPLLPNVNMEPLNLPGEEIVFYDDITKYVDYLNSYYYLESQKLSNNVENITLTTSVEEALGYSNKIYTFLPSLAEKVNKGVQAGLFLNWANEVVEDFTTNIMKKDTLDKISDVSVIIPYIGPALNIGNSALRGNFNQAFATAGVAFLLEGFPEFTIPALGVFTFYSSIQEREKIIKTIENCLEQRVKRWKDSYQWMVSNWLSRITTQFNHINYQMYDSLSYQADAIKAKIDLEYKKYSGSDKENIKSQVENLKNSLDVKISEAMNNINKFIRECSVTYLFKNMLPKVIDELNKFDLRTKTELINLIDSHNIILVGEVDRLKAKVNESFENTMPFNIFSYTNNSLLKDIINEYFN

SEQ ID NO: 65 - protein, 917 aa, Artificial Sequence
  source: /note="Description of Artificial Sequence: Synthetic polypeptide"
TWPVKDFNYSDPVNDNDILYLRIPQNKLITTPVKAFMITQNIWVIPERFSSDTNPSLSKPPRPTSKYQSYYDPSYLSTDEQKDTFLKGIIKLFKRINERDIGKKLINYLVVGSPFMGDSSTPEDTFDFTRHTTNIAVEKFENGSWKVTNIITPSVLIFGPLPNILDYTASLTLQGQQSNPSFEGFGTLSILKVAPEFLLTFSDVTSNQSSAVLGKSIFCMDPVIALMHELTHSLHQLYGINIPSDKRIRPQVSEGFFSQDGPNVQFEELYTFGGLDVEIIPQIERSQLREKALGHYKDIAKRLNNINKTIPSSWISNIDKYKKIFSEKYNFDKDNTGNFVVNIDKFNSLYSDLTNVMSEVVYSSQYNVKNRTHYFSRHYLPVFANILDDNIYTIRDGFNLTNKGFNIENSGQNIERNPALQKLSSESVVDLFTKVCVDGIITSKTKSDDDDKYADAIFTASYKRVLGQLSARKLLQDIMSRALAGGGGSGGGGSGGGGSALALQCIKVKNNRLPYVADKDSISQEIFENKIITDETNVQNYSDKFSLDESILDGQVPINPEIVDPLLPNVNMEPLNLPGEEIVFYDDITKYVDYLNSYYYLESQKLSNNVENITLTTSVEEALGYSNKIYTFLPSLAEKVNKGVQAGLFLNWANEVVEDFTTNIMKKDTLDKISDVSVIIPYIGPALNIGNSALRGNFNQAFATAGVAFLLEGFPEFTIPALGVFTFYSSIQEREKIIKTIENCLEQRVKRWKDSYQWMVSNWLSRITTQFNHINYQMYDSLSYQADAIKAKIDLEYKKYSGSDKENIKSQVENLKNSLDVKISEAMNNINKFIRECSVTYLFKNMLPKVIDELNKFDLRTKTELINLIDSHNIILVGEVDRLKAKVNESFENTMPFNIFSYTNNSLLKDIINEYFN

SEQ ID NO: 66 - protein, 917 aa, Artificial Sequence
  source: /note="Description of Artificial Sequence: Synthetic polypeptide"
TWPVKDFNYSDPVNDNDILYLRIPQNKLITTPVKAFMITQNIWVIPERFSSDTNPSLSKPPRPTSKYQSYYDPSYLSTDEQKDTFLKGIIKLFKRINERDIGKKLINYLVVGSPFMGDSSTPEDTFDFTRHTTNIAVEKFENGSWKVTNIITPSVLIFGPLPNILDYTASLTLQGQQSNPSFEGFGTLSILKVAPEFLLTFSDVTSNQSSAVLGKSIFCMDPVIALMHELTHSLHQLYGINIPSDKRIRPQVSEGFFSQDGPNVQFEELYTFGGLDVEIIPQIERSQLREKALGHYKDIAKRLNNINKTIPSSWISNIDKYKKIFSEKYNFDKDNTGNFVVNIDKFNSLYSDLTNVMSEVVYSSQYNVKNRTHYFSRHYLPVFANILDDNIYTIRDGFNLTNKGFNIENSGQNIERNPALQKLSSESVVDLFTKVCVDGIITSKTKSDDDDKYADAIFTASYNKVLGQLSARKLLQDIMSRALAGGGGSGGGGSGGGGSALALQCIKVKNNRLPYVADKDSISQEIFENKIITDETNVQNYSDKFSLDESILDGQVPINPEIVDPLLPNVNMEPLNLPGEEIVFYDDITKYVDYLNSYYYLESQKLSNNVENITLTTSVEEALGYSNKIYTFLPSLAEKVNKGVQAGLFLNWANEVVEDFTTNIMKKDTLDKISDVSVIIPYIGPALNIGNSALRGNFNQAFATAGVAFLLEGFPEFTIPALGVFTFYSSIQEREKIIKTIENCLEQRVKRWKDSYQWMVSNWLSRITTQFNHINYQMYDSLSYQADAIKAKIDLEYKKYSGSDKENIKSQVENLKNSLDVKISEAMNNINKFIRECSVTYLFKNMLPKVIDELNKFDLRTKTELINLIDSHNIILVGEVDRLKAKVNESFENTMPFNIFSYTNNSLLKDIINEYFN

SEQ ID NO: 67 - protein, 917 aa, Artificial Sequence
  source: /note="Description of Artificial Sequence: Synthetic polypeptide"
TWPVKDFNYSDPVNDNDILYLRIPQNKLITTPVKAFMITQNIWVIPERFSSDTNPSLSKPPRPTSKYQSYYDPSYLSTDEQKDTFLKGIIKLFKRINERDIGKKLINYLVVGSPFMGDSSTPEDTFDFTRHTTNIAVEKFENGSWKVTNIITPSVLIFGPLPNILDYTASLTLQGQQSNPSFEGFGTLSILKVAPEFLLTFSDVTSNQSSAVLGKSIFCMDPVIALMHELTHSLHQLYGINIPSDKRIRPQVSEGFFSQDGPNVQFEELYTFGGLDVEIIPQIERSQLREKALGHYKDIAKRLNNINKTIPSSWISNIDKYKKIFSEKYNFDKDNTGNFVVNIDKFNSLYSDLTNVMSEVVYSSQYNVKNRTHYFSRHYLPVFANILDDNIYTIRDGFNLTNKGFNIENSGQNIERNPALQKLSSESVVDLFTKVCVDGIITSKTKSDDDDKYADAIFTASYRKVLGQLSAKKLLQDIMSRALAGGGGSGGGGSGGGGSALALQCIKVKNNRLPYVADKDSISQEIFENKIITDETNVQNYSDKFSLDESILDGQVPINPEIVDPLLPNVNMEPLNLPGEEIVFYDDITKYVDYLNSYYYLESQKLSNNVENITLTTSVEEALGYSNKIYTFLPSLAEKVNKGVQAGLFLNWANEVVEDFTTNIMKKDTLDKISDVSVIIPYIGPALNIGNSALRGNFNQAFATAGVAFLLEGFPEFTIPALGVFTFYSSIQEREKIIKTIENCLEQRVKRWKDSYQWMVSNWLSRITTQFNHINYQMYDSLSYQADAIKAKIDLEYKKYSGSDKENIKSQVENLKNSLDVKISEAMNNINKFIRECSVTYLFKNMLPKVIDELNKFDLRTKTELINLIDSHNIILVGEVDRLKAKVNESFENTMPFNIFSYTNNSLLKDIINEYFN

SEQ ID NO: 68 - protein, 917 aa, Artificial Sequence
  source: /note="Description of Artificial Sequence: Synthetic polypeptide"
TWPVKDFNYSDPVNDNDILYLRIPQNKLITTPVKAFMITQNIWVIPERFSSDTNPSLSKPPRPTSKYQSYYDPSYLSTDEQKDTFLKGIIKLFKRINERDIGKKLINYLVVGSPFMGDSSTPEDTFDFTRHTTNIAVEKFENGSWKVTNIITPSVLIFGPLPNILDYTASLTLQGQQSNPSFEGFGTLSILKVAPEFLLTFSDVTSNQSSAVLGKSIFCMDPVIALMHELTHSLHQLYGINIPSDKRIRPQVSEGFFSQDGPNVQFEELYTFGGLDVEIIPQIERSQLREKALGHYKDIAKRLNNINKTIPSSWISNIDKYKKIFSEKYNFDKDNTGNFVVNIDKFNSLYSDLTNVMSEVVYSSQYNVKNRTHYFSRHYLPVFANILDDNIYTIRDGFNLTNKGFNIENSGQNIERNPALQKLSSESVVDLFTKVCVDGIITSKTKSDDDDKYADAIFTASYKKVLGQLSAKKLLQDIMSRALAGGGGSGGGGSGGGGSALALQCIKVKNNRLPYVADKDSISQEIFENKIITDETNVQNYSDKFSLDESILDGQVPINPEIVDPLLPNVNMEPLNLPGEEIVFYDDITKYVDYLNSYYYLESQKLSNNVENITLTTSVEEALGYSNKIYTFLPSLAEKVNKGVQAGLFLNWANEVVEDFTTNIMKKDTLDKISDVSVIIPYIGPALNIGNSALRGNFNQAFATAGVAFLLEGFPEFTIPALGVFTFYSSIQEREKIIKTIENCLEQRVKRWKDSYQWMVSNWLSRITTQFNHINYQMYDSLSYQADAIKAKIDLEYKKYSGSDKENIKSQVENLKNSLDVKISEAMNNINKFIRECSVTYLFKNMLPKVIDELNKFDLRTKTELINLIDSHNIILVGEVDRLKAKVNESFENTMPFNIFSYTNNSLLKDIINEYFN

SEQ ID NO: 69 - protein, 917 aa, Artificial Sequence
  source: /note="Description of Artificial Sequence: Synthetic polypeptide"
TWPVKDFNYSDPVNDNDILYLRIPQNKLITTPVKAFMITQNIWVIPERFSSDTNPSLSKPPRPTSKYQSYYDPSYLSTDEQKDTFLKGIIKLFKRINERDIGKKLINYLVVGSPFMGDSSTPEDTFDFTRHTTNIAVEKFENGSWKVTNIITPSVLIFGPLPNILDYTASLTLQGQQSNPSFEGFGTLSILKVAPEFLLTFSDVTSNQSSAVLGKSIFCMDPVIALMHELTHSLHQLYGINIPSDKRIRPQVSEGFFSQDGPNVQFEELYTFGGLDVEIIPQIERSQLREKALGHYKDIAKRLNNINKTIPSSWISNIDKYKKIFSEKYNFDKDNTGNFVVNIDKFNSLYSDLTNVMSEVVYSSQYNVKNRTHYFSRHYLPVFANILDDNIYTIRDGFNLTNKGFNIENSGQNIERNPALQKLSSESVVDLFTKVCVDGIITSKTKSDDDDKYADAIFTASYRKVLGQLSANKLLQDIMSRALAGGGGSGGGGSGGGGSALALQCIKVKNNRLPYVADKDSISQEIFENKIITDETNVQNYSDKFSLDESILDGQVPINPEIVDPLLPNVNMEPLNLPGEEIVFYDDITKYVDYLNSYYYLESQKLSNNVENITLTTSVEEALGYSNKIYTFLPSLAEKVNKGVQAGLFLNWANEVVEDFTTNIMKKDTLDKISDVSVIIPYIGPALNIGNSALRGNFNQAFATAGVAFLLEGFPEFTIPALGVFTFYSSIQEREKIIKTIENCLEQRVKRWKDSYQWMVSNWLSRITTQFNHINYQMYDSLSYQADAIKAKIDLEYKKYSGSDKENIKSQVENLKNSLDVKISEAMNNINKFIRECSVTYLFKNMLPKVIDELNKFDLRTKTELINLIDSHNIILVGEVDRLKAKVNESFENTMPFNIFSYTNNSLLKDIINEYFN

SEQ ID NO: 70 - protein, 917 aa, Artificial Sequence
  source: /note="Description of Artificial Sequence: Synthetic polypeptide"
TWPVKDFNYSDPVNDNDILYLRIPQNKLITTPVKAFMITQNIWVIPERFSSDTNPSLSKPPRPTSKYQSYYDPSYLSTDEQKDTFLKGIIKLFKRINERDIGKKLINYLVVGSPFMGDSSTPEDTFDFTRHTTNIAVEKFENGSWKVTNIITPSVLIFGPLPNILDYTASLTLQGQQSNPSFEGFGTLSILKVAPEFLLTFSDVTSNQSSAVLGKSIFCMDPVIALMHELTHSLHQLYGINIPSDKRIRPQVSEGFFSQDGPNVQFEELYTFGGLDVEIIPQIERSQLREKALGHYKDIAKRLNNINKTIPSSWISNIDKYKKIFSEKYNFDKDNTGNFVVNIDKFNSLYSDLTNVMSEVVYSSQYNVKNRTHYFSRHYLPVFANILDDNIYTIRDGFNLTNKGFNIENSGQNIERNPALQKLSSESVVDLFTKVCVDGIITSKTKSDDDDKYADAIFTASYRNVLGQLSARKLLQDIMSRALAGGGGSGGGGSGGGGSALALQCIKVKNNRLPYVADKDSISQEIFENKIITDETNVQNYSDKFSLDESILDGQVPINPEIVDPLLPNVNMEPLNLPGEEIVFYDDITKYVDYLNSYYYLESQKLSNNVENITLTTSVEEALGYSNKIYTFLPSLAEKVNKGVQAGLFLNWANEVVEDFTTNIMKKDTLDKISDVSVIIPYIGPALNIGNSALRGNFNQAFATAGVAFLLEGFPEFTIPALGVFTFYSSIQEREKIIKTIENCLEQRVKRWKDSYQWMVSNWLSRITTQFNHINYQMYDSLSYQADAIKAKIDLEYKKYSGSDKENIKSQVENLKNSLDVKISEAMNNINKFIRECSVTYLFKNMLPKVIDELNKFDLRTKTELINLIDSHNIILVGEVDRLKAKVNESFENTMPFNIFSYTNNSLLKDIINEYFN

SEQ ID NO: 71 - protein, 917 aa, Artificial Sequence
  source: /note="Description of Artificial Sequence: Synthetic polypeptide"
TWPVKDFNYSDPVNDNDILYLRIPQNKLITTPVKAFMITQNIWVIPERFSSDTNPSLSKPPRPTSKYQSYYDPSYLSTDEQKDTFLKGIIKLFKRINERDIGKKLINYLVVGSPFMGDSSTPEDTFDFTRHTTNIAVEKFENGSWKVTNIITPSVLIFGPLPNILDYTASLTLQGQQSNPSFEGFGTLSILKVAPEFLLTFSDVTSNQSSAVLGKSIFCMDPVIALMHELTHSLHQLYGINIPSDKRIRPQVSEGFFSQDGPNVQFEELYTFGGLDVEIIPQIERSQLREKALGHYKDIAKRLNNINKTIPSSWISNIDKYKKIFSEKYNFDKDNTGNFVVNIDKFNSLYSDLTNVMSEVVYSSQYNVKNRTHYFSRHYLPVFANILDDNIYTIRDGFNLTNKGFNIENSGQNIERNPALQKLSSESVVDLFTKVCVDGIITSKTKSDDDDKYADAIFTASYRKVLGQLSARNLLQDIMSRALAGGGGSGGGGSGGGGSALALQCIKVKNNRLPYVADKDSISQEIFENKIITDETNVQNYSDKFSLDESILDGQVPINPEIVDPLLPNVNMEPLNLPGEEIVFYDDITKYVDYLNSYYYLESQKLSNNVENITLTTSVEEALGYSNKIYTFLPSLAEKVNKGVQAGLFLNWANEVVEDFTTNIMKKDTLDKISDVSVIIPYIGPALNIGNSALRGNFNQAFATAGVAFLLEGFPEFTIPALGVFTFYSSIQEREKIIKTIENCLEQRVKRWKDSYQWMVSNWLSRITTQFNHINYQMYDSLSYQADAIKAKIDLEYKKYSGSDKENIKSQVENLKNSLDVKISEAMNNINKFIRECSVTYLFKNMLPKVIDELNKFDLRTKTELINLIDSHNIILVGEVDRLKAKVNESFENTMPFNIFSYTNNSLLKDIINEYFN

SEQ ID NO: 72 - protein, 917 aa, Artificial Sequence
  source: /note="Description of Artificial Sequence: Synthetic polypeptide"
TWPVKDFNYSDPVNDNDILYLRIPQNKLITTPVKAFMITQNIWVIPERFSSDTNPSLSKPPRPTSKYQSYYDPSYLSTDEQKDTFLKGIIKLFKRINERDIGKKLINYLVVGSPFMGDSSTPEDTFDFTRHTTNIAVEKFENGSWKVTNIITPSVLIFGPLPNILDYTASLTLQGQQSNPSFEGFGTLSILKVAPEFLLTFSDVTSNQSSAVLGKSIFCMDPVIALMHELTHSLHQLYGINIPSDKRIRPQVSEGFFSQDGPNVQFEELYTFGGLDVEIIPQIERSQLREKALGHYKDIAKRLNNINKTIPSSWISNIDKYKKIFSEKYNFDKDNTGNFVVNIDKFNSLYSDLTNVMSEVVYSSQYNVKNRTHYFSRHYLPVFANILDDNIYTIRDGFNLTNKGFNIENSGQNIERNPALQKLSSESVVDLFTKVCVDGIITSKTKSDDDDKYADAIFEASYRKVLGQLSARKLLQDIMSRALAGGGGSGGGGSGGGGSALALQCIKVKNNRLPYVADKDSISQEIFENKIITDETNVQNYSDKFSLDESILDGQVPINPEIVDPLLPNVNMEPLNLPGEEIVFYDDITKYVDYLNSYYYLESQKLSNNVENITLTTSVEEALGYSNKIYTFLPSLAEKVNKGVQAGLFLNWANEVVEDFTTNIMKKDTLDKISDVSVIIPYIGPALNIGNSALRGNFNQAFATAGVAFLLEGFPEFTIPALGVFTFYSSIQEREKIIKTIENCLEQRVKRWKDSYQWMVSNWLSRITTQFNHINYQMYDSLSYQADAIKAKIDLEYKKYSGSDKENIKSQVENLKNSLDVKISEAMNNINKFIRECSVTYLFKNMLPKVIDELNKFDLRTKTELINLIDSHNIILVGEVDRLKAKVNESFENTMPFNIFSYTNNSLLKDIINEYFN

SEQ ID NO: 73 - protein, 917 aa, Artificial Sequence
  source: /note="Description of Artificial Sequence: Synthetic polypeptide"
TWPVKDFNYSDPVNDNDILYLRIPQNKLITTPVKAFMITQNIWVIPERFSSDTNPSLSKPPRPTSKYQSYYDPSYLSTDEQKDTFLKGIIKLFKRINERDIGKKLINYLVVGSPFMGDSSTPEDTFDFTRHTTNIAVEKFENGSWKVTNIITPSVLIFGPLPNILDYTASLTLQGQQSNPSFEGFGTLSILKVAPEFLLTFSDVTSNQSSAVLGKSIFCMDPVIALMHELTHSLHQLYGINIPSDKRIRPQVSEGFFSQDGPNVQFEELYTFGGLDVEIIPQIERSQLREKALGHYKDIAKRLNNINKTIPSSWISNIDKYKKIFSEKYNFDKDNTGNFVVNIDKFNSLYSDLTNVMSEVVYSSQYNVKNRTHYFSRHYLPVFANILDDNIYTIRDGFNLTNKGFNIENSGQNIERNPALQKLSSESVVDLFTKVCVDGIITSKTKSDDDDKYADAIFTASERKVLGQLSARKLLQDIMSRALAGGGGSGGGGSGGGGSALALQCIKVKNNRLPYVADKDSISQEIFENKIITDETNVQNYSDKFSLDESILDGQVPINPEIVDPLLPNVNMEPLNLPGEEIVFYDDITKYVDYLNSYYYLESQKLSNNVENITLTTSVEEALGYSNKIYTFLPSLAEKVNKGVQAGLFLNWANEVVEDFTTNIMKKDTLDKISDVSVIIPYIGPALNIGNSALRGNFNQAFATAGVAFLLEGFPEFTIPALGVFTFYSSIQEREKIIKTIENCLEQRVKRWKDSYQWMVSNWLSRITTQFNHINYQMYDSLSYQADAIKAKIDLEYKKYSGSDKENIKSQVENLKNSLDVKISEAMNNINKFIRECSVTYLFKNMLPKVIDELNKFDLRTKTELINLIDSHNIILVGEVDRLKAKVNESFENTMPFNIFSYTNNSLLKDIINEYFN

SEQ ID NO: 74 - protein, 917 aa, Artificial Sequence
  source: /note="Description of Artificial Sequence: Synthetic polypeptide"
TWPVKDFNYSDPVNDNDILYLRIPQNKLITTPVKAFMITQNIWVIPERFSSDTNPSLSKPPRPTSKYQSYYDPSYLSTDEQKDTFLKGIIKLFKRINERDIGKKLINYLVVGSPFMGDSSTPEDTFDFTRHTTNIAVEKFENGSWKVTNIITPSVLIFGPLPNILDYTASLTLQGQQSNPSFEGFGTLSILKVAPEFLLTFSDVTSNQSSAVLGKSIFCMDPVIALMHELTHSLHQLYGINIPSDKRIRPQVSEGFFSQDGPNVQFEELYTFGGLDVEIIPQIERSQLREKALGHYKDIAKRLNNINKTIPSSWISNIDKYKKIFSEKYNFDKDNTGNFVVNIDKFNSLYSDLTNVMSEVVYSSQYNVKNRTHYFSRHYLPVFANILDDNIYTIRDGFNLTNKGFNIENSGQNIERNPALQKLSSESVVDLFTKVCVDGIITSKTKSDDDDKYADAIFTASYRKELGQLSARKLLQDIMSRALAGGGGSGGGGSGGGGSALALQCIKVKNNRLPYVADKDSISQEIFENKIITDETNVQNYSDKFSLDESILDGQVPINPEIVDPLLPNVNMEPLNLPGEEIVFYDDITKYVDYLNSYYYLESQKLSNNVENITLTTSVEEALGYSNKIYTFLPSLAEKVNKGVQAGLFLNWANEVVEDFTTNIMKKDTLDKISDVSVIIPYIGPALNIGNSALRGNFNQAFATAGVAFLLEGFPEFTIPALGVFTFYSSIQEREKIIKTIENCLEQRVKRWKDSYQWMVSNWLSRITTQFNHINYQMYDSLSYQADAIKAKIDLEYKKYSGSDKENIKSQVENLKNSLDVKISEAMNNINKFIRECSVTYLFKNMLPKVIDELNKFDLRTKTELINLIDSHNIILVGEVDRLKAKVNESFENTMPFNIFSYTNNSLLKDIINEYFN

SEQ ID NO: 75 - protein, 917 aa, Artificial Sequence
  source: /note="Description of Artificial Sequence: Synthetic polypeptide"
TWPVKDFNYSDPVNDNDILYLRIPQNKLITTPVKAFMITQNIWVIPERFSSDTNPSLSKPPRPTSKYQSYYDPSYLSTDEQKDTFLKGIIKLFKRINERDIGKKLINYLVVGSPFMGDSSTPEDTFDFTRHTTNIAVEKFENGSWKVTNIITPSVLIFGPLPNILDYTASLTLQGQQSNPSFEGFGTLSILKVAPEFLLTFSDVTSNQSSAVLGKSIFCMDPVIALMHELTHSLHQLYGINIPSDKRIRPQVSEGFFSQDGPNVQFEELYTFGGLDVEIIPQIERSQLREKALGHYKDIAKRLNNINKTIPSSWISNIDKYKKIFSEKYNFDKDNTGNFVVNIDKFNSLYSDLTNVMSEVVYSSQYNVKNRTHYFSRHYLPVFANILDDNIYTIRDGFNLTNKGFNIENSGQNIERNPALQKLSSESVVDLFTKVCVDGIITSKTKSDDDDKYADAIFTASYRKVLGQLSARKLLQDIMSRALAGGGGSGGGGSGGGGSALALQCIKVKNNRLPYVADKDSISQEIFENKIITDETNVQNYSDKFSLDESILDGQVPINPEIVDPLLPNVNMEPLNLPGEEIVFYDDITKYVDYLNSYYYLESQKLSNNVENITLTTSVEEALGYSNKIYTFLPSLAEKVNKGVQAGLFLNWANEVVEDFTTNIMKKDTLDKISDVSVIIPYIGPALNIGNSALRGNFNQAFATAGVAFLLEGFPEFTIPALGVFTFYSSIQEREKIIKTIENCLEQRVKRWKDSYQWMVSNWLSRITTQFNHINYQMYDSLSYQADAIKAKIDLEYKKYSGSDKENIKSQVENLKNSLDVKISEAMNNINKFIRECSVTYLFKNMLPKVIDELNKFDLRTKTELINLIDSHNIILVGEVDRLKAKVNESFENTMPFNIFSYTNNSLLKDIINEYFN

SEQ ID NO: 76 - protein, 917 aa, Artificial Sequence
  source: /note="Description of Artificial Sequence: Synthetic polypeptide"
TWPVKDFNYSDPVNDNDILYLRIPQNKLITTPVKAFMITQNIWVIPERFSSDTNPSLSKPPRPTSKYQSYYDPSYLSTDEQKDTFLKGIIKLFKRINERDIGKKLINYLVVGSPFMGDSSTPEDTFDFTRHTTNIAVEKFENGSWKVTNIITPSVLIFGPLPNILDYTASLTLQGQQSNPSFEGFGTLSILKVAPEFLLTFSDVTSNQSSAVLGKSIFCMDPVIALMHELTHSLHQLYGINIPSDKRIRPQVSEGFFSQDGPNVQFEELYTFGGLDVEIIPQIERSQLREKALGHYKDIAKRLNNINKTIPSSWISNIDKYKKIFSEKYNFDKDNTGNFVVNIDKFNSLYSDLTNVMSEVVYSSQYNVKNRTHYFSRHYLPVFANILDDNIYTIRDGFNLTNKGFNIENSGQNIERNPALQKLSSESVVDLFTKVCVDGIITSKTKSDDDDKYADAIFTESYRKVLGQLSARKLLQDIMSRALAGGGGSGGGGSGGGGSALALQCIKVKNNRLPYVADKDSISQEIFENKIITDETNVQNYSDKFSLDESILDGQVPINPEIVDPLLPNVNMEPLNLPGEEIVFYDDITKYVDYLNSYYYLESQKLSNNVENITLTTSVEEALGYSNKIYTFLPSLAEKVNKGVQAGLFLNWANEVVEDFTTNIMKKDTLDKISDVSVIIPYIGPALNIGNSALRGNFNQAFATAGVAFLLEGFPEFTIPALGVFTFYSSIQEREKIIKTIENCLEQRVKRWKDSYQWMVSNWLSRITTQFNHINYQMYDSLSYQADAIKAKIDLEYKKYSGSDKENIKSQVENLKNSLDVKISEAMNNINKFIRECSVTYLFKNMLPKVIDELNKFDLRTKTELINLIDSHNIILVGEVDRLKAKVNESFENTMPFNIFSYTNNSLLKDIINEYFN

SEQ ID NO: 77 - protein, 915 aa, Artificial Sequence
  source: /note="Description of Artificial Sequence: Synthetic polypeptide"
TWPVKDFNYSDPVNDNDILYLRIPQNKLITTPVKAFMITQNIWVIPERFSSDTNPSLSKPPRPTSKYQSYYDPSYLSTDEQKDTFLKGIIKLFKRINERDIGKKLINYLVVGSPFMGDSSTPEDTFDFTRHTTNIAVEKFENGSWKVTNIITPSVLIFGPLPNILDYTASLTLQGQQSNPSFEGFGTLSILKVAPEFLLTFSDVTSNQSSAVLGKSIFCMDPVIALMHELTHSLHQLYGINIPSDKRIRPQVSEGFFSQDGPNVQFEELYTFGGLDVEIIPQIERSQLREKALGHYKDIAKRLNNINKTIPSSWISNIDKYKKIFSEKYNFDKDNTGNFVVNIDKFNSLYSDLTNVMSEVVYSSQYNVKNRTHYFSRHYLPVFANILDDNIYTIRDGFNLTNKGFNIENSGQNIERNPALQKLSSESVVDLFTKVCVDGIITSKTKSDDDDKYADAIFTNSYRKVLAQLSARKLLQDIMALAGGGGSGGGGSGGGGSALALQCIKVKNNRLPYVADKDSISQEIFENKIITDETNVQNYSDKFSLDESILDGQVPINPEIVDPLLPNVNMEPLNLPGEEIVFYDDITKYVDYLNSYYYLESQKLSNNVENITLTTSVEEALGYSNKIYTFLPSLAEKVNKGVQAGLFLNWANEVVEDFTTNIMKKDTLDKISDVSVIIPYIGPALNIGNSALRGNFNQAFATAGVAFLLEGFPEFTIPALGVFTFYSSIQEREKIIKTIENCLEQRVKRWKDSYQWMVSNWLSRITTQFNHINYQMYDSLSYQADAIKAKIDLEYKKYSGSDKENIKSQVENLKNSLDVKISEAMNNINKFIRECSVTYLFKNMLPKVIDELNKFDLRTKTELINLIDSHNIILVGEVDRLKAKVNESFENTMPFNIFSYTNNSLLKDIINEYFN

SEQ ID NO: 78 - protein, 917 aa, Artificial Sequence
  source: /note="Description of Artificial Sequence: Synthetic polypeptide"
TWPVKDFNYSDPVNDNDILYLRIPQNKLITTPVKAFMITQNIWVIPERFSSDTNPSLSKPPRPTSKYQSYYDPSYLSTDEQKDTFLKGIIKLFKRINERDIGKKLINYLVVGSPFMGDSSTPEDTFDFTRHTTNIAVEKFENGSWKVTNIITPSVLIFGPLPNILDYTASLTLQGQQSNPSFEGFGTLSILKVAPEFLLTFSDVTSNQSSAVLGKSIFCMDPVIALMHELTHSLHQLYGINIPSDKRIRPQVSEGFFSQDGPNVQFEELYTFGGLDVEIIPQIERSQLREKALGHYKDIAKRLNNINKTIPSSWISNIDKYKKIFSEKYNFDKDNTGNFVVNIDKFNSLYSDLTNVMSEVVYSSQYNVKNRTHYFSRHYLPVFANILDDNIYTIRDGFNLTNKGFNIENSGQNIERNPALQKLSSESVVDLFTKVCVDGIITSKTKSDDDDKYADAIFTNSYRKVLAQLSARKLLQDIMSRALAGGGGSGGGGSGGGGSALALQCIKVKNNRLPYVADKDSISQEIFENKIITDETNVQNYSDKFSLDESILDGQVPINPEIVDPLLPNVNMEPLNLPGEEIVFYDDITKYVDYLNSYYYLESQKLSNNVENITLTTSVEEALGYSNKIYTFLPSLAEKVNKGVQAGLFLNWANEVVEDFTTNIMKKDTLDKISDVSVIIPYIGPALNIGNSALRGNFNQAFATAGVAFLLEGFPEFTIPALGVFTFYSSIQEREKIIKTIENCLEQRVKRWKDSYQWMVSNWLSRITTQFNHINYQMYDSLSYQADAIKAKIDLEYKKYSGSDKENIKSQVENLKNSLDVKISEAMNNINKFIRECSVTYLFKNMLPKVIDELNKFDLRTKTELINLIDSHNIILVGEVDRLKAKVNESFENTMPFNIFSYTNNSLLKDIINEYFN

SEQ ID NO: 79 - protein, 917 aa, Artificial Sequence
  source: /note="Description of Artificial Sequence: Synthetic polypeptide"
TWPVKDFNYSDPVNDNDILYLRIPQNKLITTPVKAFMITQNIWVIPERFSSDTNPSLSKPPRPTSKYQSYYDPSYLSTDEQKDTFLKGIIKLFKRINERDIGKKLINYLVVGSPFMGDSSTPEDTFDFTRHTTNIAVEKFENGSWKVTNIITPSVLIFGPLPNILDYTASLTLQGQQSNPSFEGFGTLSILKVAPEFLLTFSDVTSNQSSAVLGKSIFCMDPVIALMHELTHSLHQLYGINIPSDKRIRPQVSEGFFSQDGPNVQFEELYTFGGLDVEIIPQIERSQLREKALGHYKDIAKRLNNINKTIPSSWISNIDKYKKIFSEKYNFDKDNTGNFVVNIDKFNSLYSDLTNVMSEVVYSSQYNVKNRTHYFSRHYLPVFANILDDNIYTIRDGFNLTNKGFNIENSGQNIERNPALQKLSSESVVDLFTKVCVDGIITSKTKSDDDDKYADAIFTASYRKVLAQLSARKLLQDIMSRALAGGGGSGGGGSGGGGSALALQCIKVKNNRLPYVADKDSISQEIFENKIITDETNVQNYSDKFSLDESILDGQVPINPEIVDPLLPNVNMEPLNLPGEEIVFYDDITKYVDYLNSYYYLESQKLSNNVENITLTTSVEEALGYSNKIYTFLPSLAEKVNKGVQAGLFLNWANEVVEDFTTNIMKKDTLDKISDVSVIIPYIGPALNIGNSALRGNFNQAFATAGVAFLLEGFPEFTIPALGVFTFYSSIQEREKIIKTIENCLEQRVKRWKDSYQWMVSNWLSRITTQFNHINYQMYDSLSYQADAIKAKIDLEYKKYSGSDKENIKSQVENLKNSLDVKISEAMNNINKFIRECSVTYLFKNMLPKVIDELNKFDLRTKTELINLIDSHNIILVGEVDRLKAKVNESFENTMPFNIFSYTNNSLLKDIINEYFN

SEQ ID NO: 80 - protein, 917 aa, Artificial Sequence
  source: /note="Description of Artificial Sequence: Synthetic polypeptide"
TWPVKDFNYSDPVNDNDILYLRIPQNKLITTPVKAFMITQNIWVIPERFSSDTNPSLSKPPRPTSKYQSYYDPSYLSTDEQKDTFLKGIIKLFKRINERDIGKKLINYLVVGSPFMGDSSTPEDTFDFTRHTTNIAVEKFENGSWKVTNIITPSVLIFGPLPNILDYTASLTLQGQQSNPSFEGFGTLSILKVAPEFLLTFSDVTSNQSSAVLGKSIFCMDPVIALMHELTHSLHQLYGINIPSDKRIRPQVSEGFFSQDGPNVQFEELYTFGGLDVEIIPQIERSQLREKALGHYKDIAKRLNNINKTIPSSWISNIDKYKKIFSEKYNFDKDNTGNFVVNIDKFNSLYSDLTNVMSEVVYSSQYNVKNRTHYFSRHYLPVFANILDDNIYTIRDGFNLTNKGFNIENSGQNIERNPALQKLSSESVVDLFTKVCVDGIITSKTKSDDDDKYADAIFTAAYRKVLAQLSARKALQDIASRALAGGGGSGGGGSGGGGSALALQCIKVKNNRLPYVADKDSISQEIFENKIITDETNVQNYSDKFSLDESILDGQVPINPEIVDPLLPNVNMEPLNLPGEEIVFYDDITKYVDYLNSYYYLESQKLSNNVENITLTTSVEEALGYSNKIYTFLPSLAEKVNKGVQAGLFLNWANEVVEDFTTNIMKKDTLDKISDVSVIIPYIGPALNIGNSALRGNFNQAFATAGVAFLLEGFPEFTIPALGVFTFYSSIQEREKIIKTIENCLEQRVKRWKDSYQWMVSNWLSRITTQFNHINYQMYDSLSYQADAIKAKIDLEYKKYSGSDKENIKSQVENLKNSLDVKISEAMNNINKFIRECSVTYLFKNMLPKVIDELNKFDLRTKTELINLIDSHNIILVGEVDRLKAKVNESFENTMPFNIFSYTNNSLLKDIINEYFN

SEQ ID NO: 81 - protein, 917 aa, Artificial Sequence
  source: /note="Description of Artificial Sequence: Synthetic polypeptide"
TWPVKDFNYSDPVNDNDILYLRIPQNKLITTPVKAFMITQNIWVIPERFSSDTNPSLSKPPRPTSKYQSYYDPSYLSTDEQKDTFLKGIIKLFKRINERDIGKKLINYLVVGSPFMGDSSTPEDTFDFTRHTTNIAVEKFENGSWKVTNIITPSVLIFGPLPNILDYTASLTLQGQQSNPSFEGFGTLSILKVAPEFLLTFSDVTSNQSSAVLGKSIFCMDPVIALMHELTHSLHQLYGINIPSDKRIRPQVSEGFFSQDGPNVQFEELYTFGGLDVEIIPQIERSQLREKALGHYKDIAKRLNNINKTIPSSWISNIDKYKKIFSEKYNFDKDNTGNFVVNIDKFNSLYSDLTNVMSEVVYSSQYNVKNRTHYFSRHYLPVFANILDDNIYTIRDGFNLTNKGFNIENSGQNIERNPALQKLSSESVVDLFTKVCVDGIITSKTKSDDDDKYADAIFTAAYRKVLAQLSARKALQDIMSRALAGGGGSGGGGSGGGGSALALQCIKVKNNRLPYVADKDSISQEIFENKIITDETNVQNYSDKFSLDESILDGQVPINPEIVDPLLPNVNMEPLNLPGEEIVFYDDITKYVDYLNSYYYLESQKLSNNVENITLTTSVEEALGYSNKIYTFLPSLAEKVNKGVQAGLFLNWANEVVEDFTTNIMKKDTLDKISDVSVIIPYIGPALNIGNSALRGNFNQAFATAGVAFLLEGFPEFTIPALGVFTFYSSIQEREKIIKTIENCLEQRVKRWKDSYQWMVSNWLSRITTQFNHINYQMYDSLSYQADAIKAKIDLEYKKYSGSDKENIKSQVENLKNSLDVKISEAMNNINKFIRECSVTYLFKNMLPKVIDELNKFDLRTKTELINLIDSHNIILVGEVDRLKAKVNESFENTMPFNIFSYTNNSLLKDIINEYFN

SEQ ID NO: 82 - protein, 920 aa, Artificial Sequence
  source: /note="Description of Artificial Sequence: Synthetic polypeptide"
TWPVKDFNYSDPVNDNDILYLRIPQNKLITTPVKAFMITQNIWVIPERFSSDTNPSLSKPPRPTSKYQSYYDPSYLSTDEQKDTFLKGIIKLFKRINERDIGKKLINYLVVGSPFMGDSSTPEDTFDFTRHTTNIAVEKFENGSWKVTNIITPSVLIFGPLPNILDYTASLTLQGQQSNPSFEGFGTLSILKVAPEFLLTFSDVTSNQSSAVLGKSIFCMDPVIALMHELTHSLHQLYGINIPSDKRIRPQVSEGFFSQDGPNVQFEELYTFGGLDVEIIPQIERSQLREKALGHYKDIAKRLNNINKTIPSSWISNIDKYKKIFSEKYNFDKDNTGNFVVNIDKFNSLYSDLTNVMSEVVYSSQYNVKNRTHYFSRHYLPVFANILDDNIYTIRDGFNLTNKGFNIENSGQNIERNPALQKLSSESVVDLFTKVCVDGIITSKTKSDDDDKHVDAIFTQSYRKVLAQLSARKALQDILSRQQGALAGGGGSGGGGSGGGGSALALQCIKVKNNRLPYVADKDSISQEIFENKIITDETNVQNYSDKFSLDESILDGQVPINPEIVDPLLPNVNMEPLNLPGEEIVFYDDITKYVDYLNSYYYLESQKLSNNVENITLTTSVEEALGYSNKIYTFLPSLAEKVNKGVQAGLFLNWANEVVEDFTTNIMKKDTLDKISDVSVIIPYIGPALNIGNSALRGNFNQAFATAGVAFLLEGFPEFTIPALGVFTFYSSIQEREKIIKTIENCLEQRVKRWKDSYQWMVSNWLSRITTQFNHINYQMYDSLSYQADAIKAKIDLEYKKYSGSDKENIKSQVENLKNSLDVKISEAMNNINKFIRECSVTYLFKNMLPKVIDELNKFDLRTKTELINLIDSHNIILVGEVDRLKAKVNESFENTMPFNIFSYTNNSLLKDIINEYFN

SEQ ID NO: 83 - protein, 917 aa, Artificial Sequence
  source: /note="Description of Artificial Sequence: Synthetic polypeptide"
TWPVKDFNYSDPVNDNDILYLRIPQNKLITTPVKAFMITQNIWVIPERFSSDTNPSLSKPPRPTSKYQSYYDPSYLSTDEQKDTFLKGIIKLFKRINERDIGKKLINYLVVGSPFMGDSSTPEDTFDFTRHTTNIAVEKFENGSWKVTNIITPSVLIFGPLPNILDYTASLTLQGQQSNPSFEGFGTLSILKVAPEFLLTFSDVTSNQSSAVLGKSIFCMDPVIALMHELTHSLHQLYGINIPSDKRIRPQVSEGFFSQDGPNVQFEELYTFGGLDVEIIPQIERSQLREKALGHYKDIAKRLNNINKTIPSSWISNIDKYKKIFSEKYNFDKDNTGNFVVNIDKFNSLYSDLTNVMSEVVYSSQYNVKNRTHYFSRHYLPVFANILDDNIYTIRDGFNLTNKGFNIENSGQNIERNPALQKLSSESVVDLFTKVCVDGIITSKTKSDDDDKHVDAIFTSSYRKVLAQLSARKLLQDILSRALAGGGGSGGGGSGGGGSALALQCIKVKNNRLPYVADKDSISQEIFENKIITDETNVQNYSDKFSLDESILDGQVPINPEIVDPLLPNVNMEPLNLPGEEIVFYDDITKYVDYLNSYYYLESQKLSNNVENITLTTSVEEALGYSNKIYTFLPSLAEKVNKGVQAGLFLNWANEVVEDFTTNIMKKDTLDKISDVSVIIPYIGPALNIGNSALRGNFNQAFATAGVAFLLEGFPEFTIPALGVFTFYSSIQEREKIIKTIENCLEQRVKRWKDSYQWMVSNWLSRITTQFNHINYQMYDSLSYQADAIKAKIDLEYKKYSGSDKENIKSQVENLKNSLDVKISEAMNNINKFIRECSVTYLFKNMLPKVIDELNKFDLRTKTELINLIDSHNIILVGEVDRLKAKVNESFENTMPFNIFSYTNNSLLKDIINEYFN

SEQ ID NO: 84 - protein, 917 aa, Artificial Sequence
  source: /note="Description of Artificial Sequence: Synthetic polypeptide"
TWPVKDFNYSDPVNDNDILYLRIPQNKLITTPVKAFMITQNIWVIPERFSSDTNPSLSKPPRPTSKYQSYYDPSYLSTDEQKDTFLKGIIKLFKRINERDIGKKLINYLVVGSPFMGDSSTPEDTFDFTRHTTNIAVEKFENGSWKVTNIITPSVLIFGPLPNILDYTASLTLQGQQSNPSFEGFGTLSILKVAPEFLLTFSDVTSNQSSAVLGKSIFCMDPVIALMHELTHSLHQLYGINIPSDKRIRPQVSEGFFSQDGPNVQFEELYTFGGLDVEIIPQIERSQLREKALGHYKDIAKRLNNINKTIPSSWISNIDKYKKIFSEKYNFDKDNTGNFVVNIDKFNSLYSDLTNVMSEVVYSSQYNVKNRTHYFSRHYLPVFANILDDNIYTIRDGFNLTNKGFNIENSGQNIERNPALQKLSSESVVDLFTKVCVDGIITSKTKSDDDDKHVDAIFTTSYRKVLAQLSARKLLQDILSRALAGGGGSGGGGSGGGGSALALQCIKVKNNRLPYVADKDSISQEIFENKIITDETNVQNYSDKFSLDESILDGQVPINPEIVDPLLPNVNMEPLNLPGEEIVFYDDITKYVDYLNSYYYLESQKLSNNVENITLTTSVEEALGYSNKIYTFLPSLAEKVNKGVQAGLFLNWANEVVEDFTTNIMKKDTLDKISDVSVIIPYIGPALNIGNSALRGNFNQAFATAGVAFLLEGFPEFTIPALGVFTFYSSIQEREKIIKTIENCLEQRVKRWKDSYQWMVSNWLSRITTQFNHINYQMYDSLSYQADAIKAKIDLEYKKYSGSDKENIKSQVENLKNSLDVKISEAMNNINKFIRECSVTYLFKNMLPKVIDELNKFDLRTKTELINLIDSHNIILVGEVDRLKAKVNESFENTMPFNIFSYTNNSLLKDIINEYFN

SEQ ID NO: 85 - protein, 917 aa, Artificial Sequence
  source: /note="Description of Artificial Sequence: Synthetic polypeptide"
TWPVKDFNYSDPVNDNDILYLRIPQNKLITTPVKAFMITQNIWVIPERFSSDTNPSLSKPPRPTSKYQSYYDPSYLSTDEQKDTFLKGIIKLFKRINERDIGKKLINYLVVGSPFMGDSSTPEDTFDFTRHTTNIAVEKFENGSWKVTNIITPSVLIFGPLPNILDYTASLTLQGQQSNPSFEGFGTLSILKVAPEFLLTFSDVTSNQSSAVLGKSIFCMDPVIALMHELTHSLHQLYGINIPSDKRIRPQVSEGFFSQDGPNVQFEELYTFGGLDVEIIPQIERSQLREKALGHYKDIAKRLNNINKTIPSSWISNIDKYKKIFSEKYNFDKDNTGNFVVNIDKFNSLYSDLTNVMSEVVYSSQYNVKNRTHYFSRHYLPVFANILDDNIYTIRDGFNLTNKGFNIENSGQNIERNPALQKLSSESVVDLFTKVCVDGIITSKTKSDDDDKYADAIFTQSYRKVLAQLSARKALQDILNRALAGGGGSGGGGSGGGGSALALQCIKVKNNRLPYVADKDSISQEIFENKIITDETNVQNYSDKFSLDESILDGQVPINPEIVDPLLPNVNMEPLNLPGEEIVFYDDITKYVDYLNSYYYLESQKLSNNVENITLTTSVEEALGYSNKIYTFLPSLAEKVNKGVQAGLFLNWANEVVEDFTTNIMKKDTLDKISDVSVIIPYIGPALNIGNSALRGNFNQAFATAGVAFLLEGFPEFTIPALGVFTFYSSIQEREKIIKTIENCLEQRVKRWKDSYQWMVSNWLSRITTQFNHINYQMYDSLSYQADAIKAKIDLEYKKYSGSDKENIKSQVENLKNSLDVKISEAMNNINKFIRECSVTYLFKNMLPKVIDELNKFDLRTKTELINLIDSHNIILVGEVDRLKAKVNESFENTMPFNIFSYTNNSLLKDIINEYFN

SEQ ID NO: 86 - protein, 917 aa, Artificial Sequence
  source: /note="Description of Artificial Sequence: Synthetic polypeptide"
TWPVKDFNYSDPVNDNDILYLRIPQNKLITTPVKAFMITQNIWVIPERFSSDTNPSLSKPPRPTSKYQSYYDPSYLSTDEQKDTFLKGIIKLFKRINERDIGKKLINYLVVGSPFMGDSSTPEDTFDFTRHTTNIAVEKFENGSWKVTNIITPSVLIFGPLPNILDYTASLTLQGQQSNPSFEGFGTLSILKVAPEFLLTFSDVTSNQSSAVLGKSIFCMDPVIALMHELTHSLHQLYGINIPSDKRIRPQVSEGFFSQDGPNVQFEELYTFGGLDVEIIPQIERSQLREKALGHYKDIAKRLNNINKTIPSSWISNIDKYKKIFSEKYNFDKDNTGNFVVNIDKFNSLYSDLTNVMSEVVYSSQYNVKNRTHYFSRHYLPVFANILDDNIYTIRDGFNLTNKGFNIENSGQNIERNPALQKLSSESVVDLFTKVCVDGIITSKTKSDDDDKYADAIFTQSYRKVLAQLSARKALQDILSRALAGGGGSGGGGSGGGGSALALQCIKVKNNRLPYVADKDSISQEIFENKIITDETNVQNYSDKFSLDESILDGQVPINPEIVDPLLPNVNMEPLNLPGEEIVFYDDITKYVDYLNSYYYLESQKLSNNVENITLTTSVEEALGYSNKIYTFLPSLAEKVNKGVQAGLFLNWANEVVEDFTTNIMKKDTLDKISDVSVIIPYIGPALNIGNSALRGNFNQAFATAGVAFLLEGFPEFTIPALGVFTFYSSIQEREKIIKTIENCLEQRVKRWKDSYQWMVSNWLSRITTQFNHINYQMYDSLSYQADAIKAKIDLEYKKYSGSDKENIKSQVENLKNSLDVKISEAMNNINKFIRECSVTYLFKNMLPKVIDELNKFDLRTKTELINLIDSHNIILVGEVDRLKAKVNESFENTMPFNIFSYTNNSLLKDIINEYFN

SEQ ID NO: 87 - protein, 916 aa, Artificial Sequence
  source: /note="Description of Artificial Sequence: Synthetic polypeptide"
TWPVKDFNYSDPVNDNDILYLRIPQNKLITTPVKAFMITQNIWVIPERFSSDTNPSLSKPPRPTSKYQSYYDPSYLSTDEQKDTFLKGIIKLFKRINERDIGKKLINYLVVGSPFMGDSSTPEDTFDFTRHTTNIAVEKFENGSWKVTNIITPSVLIFGPLPNILDYTASLTLQGQQSNPSFEGFGTLSILKVAPEFLLTFSDVTSNQSSAVLGKSIFCMDPVIALMHELTHSLHQLYGINIPSDKRIRPQVSEGFFSQDGPNVQFEELYTFGGLDVEIIPQIERSQLREKALGHYKDIAKRLNNINKTIPSSWISNIDKYKKIFSEKYNFDKDNTGNFVVNIDKFNSLYSDLTNVMSEVVYSSQYNVKNRTHYFSRHYLPVFANILDDNIYTIRDGFNLTNKGFNIENSGQNIERNPALQKLSSESVVDLFTKVCVDGIITSKTKSIEGRYADAIFTASYRKVLGQLSARKLLQDILSRALAGGGGSGGGGSGGGGSALALQCIKVKNNRLPYVADKDSISQEIFENKIITDETNVQNYSDKFSLDESILDGQVPINPEIVDPLLPNVNMEPLNLPGEEIVFYDDITKYVDYLNSYYYLESQKLSNNVENITLTTSVEEALGYSNKIYTFLPSLAEKVNKGVQAGLFLNWANEVVEDFTTNIMKKDTLDKISDVSVIIPYIGPALNIGNSALRGNFNQAFATAGVAFLLEGFPEFTIPALGVFTFYSSIQEREKIIKTIENCLEQRVKRWKDSYQWMVSNWLSRITTQFNHINYQMYDSLSYQADAIKAKIDLEYKKYSGSDKENIKSQVENLKNSLDVKISEAMNNINKFIRECSVTYLFKNMLPKVIDELNKFDLRTKTELINLIDSHNIILVGEVDRLKAKVNESFENTMPFNIFSYTNNSLLKDIINEYFN

SEQ ID NO: 88 - protein, 927 aa, Artificial Sequence
  Synthetic sequence
MTWPVKDFNYSDPVNDNDILYLRIPQNKLITTPVKAFMITQNIWVIPERFSSDTNPSLSKPPRPTSKYQSYYDPSYLSTDEQKDTFLKGIIKLFKRINERDIGKKLINYLVVGSPFMGDSSTPEDTFDFTRHTTNIAVEKFENGSWKVTNIITPSVLIFGPLPNILDYTASLTLQGQQSNPSFEGFGTLSILKVAPEFLLTFSDVTSNQSSAVLGKSIFCMDPVIALMHELTHSLHQLYGINIPSDKRIRPQVSEGFFSQDGPNVQFEELYTFGGLDVEIIPQIERSQLREKALGHYKDIAKRLNNINKTIPSSWISNIDKYKKIFSEKYNFDKDNTGNFVVNIDKFNSLYSDLTNVMSEVVYSSQYNVKNRTHYFSRHYLPVFANILDDNIYTIRDGFNLTNKGFNIENSGQNIERNPALQKLSSESVVDLFTKVCVDGIITSKTKSLIEGRYADAIFTNSYRKVLGQLSARKLLQDIMSRQQGESNQERGALAGGGGSGGGGSGGGGSALVLQCIKVKNNRLPYVADKDSISQEIFENKIITDETNVQNYSDKFSLDESILDGQVPINPEIVDPLLPNVNMEPLNLPGEEIVFYDDITKYVDYLNSYYYLESQKLSNNVENITLTTSVEEALGYSNKIYTFLPSLAEKVNKGVQAGLFLNWANEVVEDFTTNIMKKDTLDKISDVSVIIPYIGPALNIGNSALRGNFNQAFATAGVAFLLEGFPEFTIPALGVFTFYSSIQEREKIIKTIENCLEQRVKRWKDSYQWMVSNWLSRITTQFNHINYQMYDSLSYQADAIKAKIDLEYKKYSGSDKENIKSQVENLKNSLDVKISEAMNNINKFIRECSVTYLFKNMLPKVIDELNKFDLRTKTELINLIDSHNIILVGEVDRLKAKVNESFENTMPFNIFSYTNNSLLKDIINEYF

SEQ ID NO: 89 - protein, 931 aa, Artificial Sequence
  Synthetic sequence
MTWPVKDFNYSDPVNDNDILYLRIPQNKLITTPVKAFMITQNIWVIPERFSSDTNPSLSKPPRPTSKYQSYYDPSYLSTDEQKDTFLKGIIKLFKRINERDIGKKLINYLVVGSPFMGDSSTPEDTFDFTRHTTNIAVEKFENGSWKVTNIITPSVLIFGPLPNILDYTASLTLQGQQSNPSFEGFGTLSILKVAPEFLLTFSDVTSNQSSAVLGKSIFCMDPVIALMHELTHSLHQLYGINIPSDKRIRPQVSEGFFSQDGPNVQFEELYTFGGLDVEIIPQIERSQLREKALGHYKDIAKRLNNINKTIPSSWISNIDKYKKIFSEKYNFDKDNTGNFVVNIDKFNSLYSDLTNVMSEVVYSSQYNVKNRTHYFSRHYLPVFANILDDNIYTIRDGFNLTNKGFNIENSGQNIERNPALQKLSSESVVDLFTKVCVDGIITSKTKSLIEGRYADAIFTNSYRKVLGQLSARKLLQDIMSRQQGESNQERGARARLLAGGGGSGGGGSGGGGSALVLQCIKVKNNRLPYVADKDSISQEIFENKIITDETNVQNYSDKFSLDESILDGQVPINPEIVDPLLPNVNMEPLNLPGEEIVFYDDITKYVDYLNSYYYLESQKLSNNVENITLTTSVEEALGYSNKIYTFLPSLAEKVNKGVQAGLFLNWANEVVEDFTTNIMKKDTLDKISDVSVIIPYIGPALNIGNSALRGNFNQAFATAGVAFLLEGFPEFTIPALGVFTFYSSIQEREKIIKTIENCLEQRVKRWKDSYQWMVSNWLSRITTQFNHINYQMYDSLSYQADAIKAKIDLEYKKYSGSDKENIKSQVENLKNSLDVKISEAMNNINKFIRECSVTYLFKNMLPKVIDELNKFDLRTKTELINLIDSHNIILVGEVDRLKAKVNESFENTMPFNIFSYTNNSLLKDIINEYF

SEQ ID NO: 90 - protein, 916 aa, Artificial Sequence
  Synthetic sequence
MTWPVKDFNYSDPVNDNDILYLRIPQNKLITTPVKAFMITQNIWVIPERFSSDTNPSLSKPPRPTSKYQSYYDPSYLSTDEQKDTFLKGIIKLFKRINERDIGKKLINYLVVGSPFMGDSSTPEDTFDFTRHTTNIAVEKFENGSWKVTNIITPSVLIFGPLPNILDYTASLTLQGQQSNPSFEGFGTLSILKVAPEFLLTFSDVTSNQSSAVLGKSIFCMDPVIALMHELTHSLHQLYGINIPSDKRIRPQVSEGFFSQDGPNVQFEELYTFGGLDVEIIPQIERSQLREKALGHYKDIAKRLNNINKTIPSSWISNIDKYKKIFSEKYNFDKDNTGNFVVNIDKFNSLYSDLTNVMSEVVYSSQYNVKNRTHYFSRHYLPVFANILDDNIYTIRDGFNLTNKGFNIENSGQNIERNPALQKLSSESVVDLFTKVCVDGIITSKTKSLIEGRYADAIFTNRYRKVLGQLSARKLLQDIMSRLAGGGGSGGGGSGGGGSALVLQCIKVKNNRLPYVADKDSISQEIFENKIITDETNVQNYSDKFSLDESILDGQVPINPEIVDPLLPNVNMEPLNLPGEEIVFYDDITKYVDYLNSYYYLESQKLSNNVENITLTTSVEEALGYSNKIYTFLPSLAEKVNKGVQAGLFLNWANEVVEDFTTNIMKKDTLDKISDVSVIIPYIGPALNIGNSALRGNFNQAFATAGVAFLLEGFPEFTIPALGVFTFYSSIQEREKIIKTIENCLEQRVKRWKDSYQWMVSNWLSRITTQFNHINYQMYDSLSYQADAIKAKIDLEYKKYSGSDKENIKSQVENLKNSLDVKISEAMNNINKFIRECSVTYLFKNMLPKVIDELNKFDLRTKTELINLIDSHNIILVGEVDRLKAKVNESFENTMPFNIFSYTNNSLLKDIINEYF

SEQ ID NO: 91 - protein, 916 aa, Artificial sequence
  Synthetic sequence
MTWPVKDFNYSDPVNDNDILYLRIPQNKLITTPVKAFMITQNIWVIPERFSSDTNPSLSKPPRPTSKYQSYYDPSYLSTDEQKDTFLKGIIKLFKRINERDIGKKLINYLVVGSPFMGDSSTPEDTFDFTRHTTNIAVEKFENGSWKVTNIITPSVLIFGPLPNILDYTASLTLQGQQSNPSFEGFGTLSILKVAPEFLLTFSDVTSNQSSAVLGKSIFCMDPVIALMHELTHSLHQLYGINIPSDKRIRPQVSEGFFSQDGPNVQFEELYTFGGLDVEIIPQIERSQLREKALGHYKDIAKRLNNINKTIPSSWISNIDKYKKIFSEKYNFDKDNTGNFVVNIDKFNSLYSDLTNVMSEVVYSSQYNVKNRTHYFSRHYLPVFANILDDNIYTIRDGFNLTNKGFNIENSGQNIERNPALQKLSSESVVDLFTKVCVDGIITSKTKSLIEGRYADAIFTARYRKVLGQLSARKLLQDIMSRLAGGGGSGGGGSGGGGSALVLQCIKVKNNRLPYVADKDSISQEIFENKIITDETNVQNYSDKFSLDESILDGQVPINPEIVDPLLPNVNMEPLNLPGEEIVFYDDITKYVDYLNSYYYLESQKLSNNVENITLTTSVEEALGYSNKIYTFLPSLAEKVNKGVQAGLFLNWANEVVEDFTTNIMKKDTLDKISDVSVIIPYIGPALNIGNSALRGNFNQAFATAGVAFLLEGFPEFTIPALGVFTFYSSIQEREKIIKTIENCLEQRVKRWKDSYQWMVSNWLSRITTQFNHINYQMYDSLSYQADAIKAKIDLEYKKYSGSDKENIKSQVENLKNSLDVKISEAMNNINKFIRECSVTYLFKNMLPKVIDELNKFDLRTKTELINLIDSHNIILVGEVDRLKAKVNESFENTMPFNIFSYTNNSLLKDIINEYF

SEQ ID NO: 92 - protein, 927 aa, Artificial Sequence
  Synthetic sequence
MTWPVKDFNYSDPVNDNDILYLRIPQNKLITTPVKAFMITQNIWVIPERFSSDTNPSLSKPPRPTSKYQSYYDPSYLSTDEQKDTFLKGIIKLFKRINERDIGKKLINYLVVGSPFMGDSSTPEDTFDFTRHTTNIAVEKFENGSWKVTNIITPSVLIFGPLPNILDYTASLTLQGQQSNPSFEGFGTLSILKVAPEFLLTFSDVTSNQSSAVLGKSIFCMDPVIALMHELTHSLHQLYGINIPSDKRIRPQVSEGFFSQDGPNVQFEELYTFGGLDVEIIPQIERSQLREKALGHYKDIAKRLNNINKTIPSSWISNIDKYKKIFSEKYNFDKDNTGNFVVNIDKFNSLYSDLTNVMSEVVYSSQYNVKNRTHYFSRHYLPVFANILDDNIYTIRDGFNLTNKGFNIENSGQNIERNPALQKLSSESVVDLFTKVCVDGIITSKTKSLIEGRYADAIFTNRYRKVLGQLSARKLLQDIMSRQQGESNQERGALAGGGGSGGGGSGGGGSALVLQCIKVKNNRLPYVADKDSISQEIFENKIITDETNVQNYSDKFSLDESILDGQVPINPEIVDPLLPNVNMEPLNLPGEEIVFYDDITKYVDYLNSYYYLESQKLSNNVENITLTTSVEEALGYSNKIYTFLPSLAEKVNKGVQAGLFLNWANEVVEDFTTNIMKKDTLDKISDVSVIIPYIGPALNIGNSALRGNFNQAFATAGVAFLLEGFPEFTIPALGVFTFYSSIQEREKIIKTIENCLEQRVKRWKDSYQWMVSNWLSRITTQFNHINYQMYDSLSYQADAIKAKIDLEYKKYSGSDKENIKSQVENLKNSLDVKISEAMNNINKFIRECSVTYLFKNMLPKVIDELNKFDLRTKTELINLIDSHNIILVGEVDRLKAKVNESFENTMPFNIFSYTNNSLLKDIINEYF

SEQ ID NO: 93 - protein, 931 aa, Artificial Sequence
  Synthetic sequence
MTWPVKDFNYSDPVNDNDILYLRIPQNKLITTPVKAFMITQNIWVIPERFSSDTNPSLSKPPRPTSKYQSYYDPSYLSTDEQKDTFLKGIIKLFKRINERDIGKKLINYLVVGSPFMGDSSTPEDTFDFTRHTTNIAVEKFENGSWKVTNIITPSVLIFGPLPNILDYTASLTLQGQQSNPSFEGFGTLSILKVAPEFLLTFSDVTSNQSSAVLGKSIFCMDPVIALMHELTHSLHQLYGINIPSDKRIRPQVSEGFFSQDGPNVQFEELYTFGGLDVEIIPQIERSQLREKALGHYKDIAKRLNNINKTIPSSWISNIDKYKKIFSEKYNFDKDNTGNFVVNIDKFNSLYSDLTNVMSEVVYSSQYNVKNRTHYFSRHYLPVFANILDDNIYTIRDGFNLTNKGFNIENSGQNIERNPALQKLSSESVVDLFTKVCVDGIITSKTKSLIEGRYADAIFTNRYRKVLGQLSARKLLQDIMSRQQGESNQERGARARLLAGGGGSGGGGSGGGGSALVLQCIKVKNNRLPYVADKDSISQEIFENKIITDETNVQNYSDKFSLDESILDGQVPINPEIVDPLLPNVNMEPLNLPGEEIVFYDDITKYVDYLNSYYYLESQKLSNNVENITLTTSVEEALGYSNKIYTFLPSLAEKVNKGVQAGLFLNWANEVVEDFTTNIMKKDTLDKISDVSVIIPYIGPALNIGNSALRGNFNQAFATAGVAFLLEGFPEFTIPALGVFTFYSSIQEREKIIKTIENCLEQRVKRWKDSYQWMVSNWLSRITTQFNHINYQMYDSLSYQADAIKAKIDLEYKKYSGSDKENIKSQVENLKNSLDVKISEAMNNINKFIRECSVTYLFKNMLPKVIDELNKFDLRTKTELINLIDSHNIILVGEVDRLKAKVNESFENTMPFNIFSYTNNSLLKDIINEYF

SEQ ID NO: 94 - protein, 916 aa, Artificial Sequence
  Synthetic sequence
MTWPVKDFNYSDPVNDNDILYLRIPQNKLITTPVKAFMITQNIWVIPERFSSDTNPSLSKPPRPTSKYQSYYDPSYLSTDEQKDTFLKGIIKLFKRINERDIGKKLINYLVVGSPFMGDSSTPEDTFDFTRHTTNIAVEKFENGSWKVTNIITPSVLIFGPLPNILDYTASLTLQGQQSNPSFEGFGTLSILKVAPEFLLTFSDVTSNQSSAVLGKSIFCMDPVIALMHELTHSLHQLYGINIPSDKRIRPQVSEGFFSQDGPNVQFEELYTFGGLDVEIIPQIERSQLREKALGHYKDIAKRLNNINKTIPSSWISNIDKYKKIFSEKYNFDKDNTGNFVVNIDKFNSLYSDLTNVMSEVVYSSQYNVKNRTHYFSRHYLPVFANILDDNIYTIRDGFNLTNKGFNIENSGQNIERNPALQKLSSESVVDLFTKVCVDGIITSKTKSLIEGRYADAIFTNSYRKVRRRRSARKLLQDIMSRLAGGGGSGGGGSGGGGSALVLQCIKVKNNRLPYVADKDSISQEIFENKIITDETNVQNYSDKFSLDESILDGQVPINPEIVDPLLPNVNMEPLNLPGEEIVFYDDITKYVDYLNSYYYLESQKLSNNVENITLTTSVEEALGYSNKIYTFLPSLAEKVNKGVQAGLFLNWANEVVEDFTTNIMKKDTLDKISDVSVIIPYIGPALNIGNSALRGNFNQAFATAGVAFLLEGFPEFTIPALGVFTFYSSIQEREKIIKTIENCLEQRVKRWKDSYQWMVSNWLSRITTQFNHINYQMYDSLSYQADAIKAKIDLEYKKYSGSDKENIKSQVENLKNSLDVKISEAMNNINKFIRECSVTYLFKNMLPKVIDELNKFDLRTKTELINLIDSHNIILVGEVDRLKAKVNESFENTMPFNIFSYTNNSLLKDIINEYF

SEQ ID NO: 95 - protein, 927 aa, Artificial Sequence
  Synthetic sequence
MTWPVKDFNYSDPVNDNDILYLRIPQNKLITTPVKAFMITQNIWVIPERFSSDTNPSLSKPPRPTSKYQSYYDPSYLSTDEQKDTFLKGIIKLFKRINERDIGKKLINYLVVGSPFMGDSSTPEDTFDFTRHTTNIAVEKFENGSWKVTNIITPSVLIFGPLPNILDYTASLTLQGQQSNPSFEGFGTLSILKVAPEFLLTFSDVTSNQSSAVLGKSIFCMDPVIALMHELTHSLHQLYGINIPSDKRIRPQVSEGFFSQDGPNVQFEELYTFGGLDVEIIPQIERSQLREKALGHYKDIAKRLNNINKTIPSSWISNIDKYKKIFSEKYNFDKDNTGNFVVNIDKFNSLYSDLTNVMSEVVYSSQYNVKNRTHYFSRHYLPVFANILDDNIYTIRDGFNLTNKGFNIENSGQNIERNPALQKLSSESVVDLFTKVCVDGIITSKTKSLIEGRYADAIFTASYRKVLGQLSARKLLQDIMSRQQGESNQERGALAGGGGSGGGGSGGGGSALVLQCIKVKNNRLPYVADKDSISQEIFENKIITDETNVQNYSDKFSLDESILDGQVPINPEIVDPLLPNVNMEPLNLPGEEIVFYDDITKYVDYLNSYYYLESQKLSNNVENITLTTSVEEALGYSNKIYTFLPSLAEKVNKGVQAGLFLNWANEVVEDFTTNIMKKDTLDKISDVSVIIPYIGPALNIGNSALRGNFNQAFATAGVAFLLEGFPEFTIPALGVFTFYSSIQEREKIIKTIENCLEQRVKRWKDSYQWMVSNWLSRITTQFNHINYQMYDSLSYQADAIKAKIDLEYKKYSGSDKENIKSQVENLKNSLDVKISEAMNNINKFIRECSVTYLFKNMLPKVIDELNKFDLRTKTELINLIDSHNIILVGEVDRLKAKVNESFENTMPFNIFSYTNNSLLKDIINEYF

SEQ ID NO: 96 - protein, 928 aa, Artificial Sequence
  Synthetic sequence
PITINNFNYSDPVDNKNILYLDTHLNTLANEPEKAFRITGNIWVIPDRFSRNSNPNLNKPPRVTSPKSGYYDPNYLSTDSDKDTFLKEIIKLFKRINSREIGEELIYRLSTDIPFPGNNNTPINTFDFDVDFNSVDVKTRQGNNWVKTGSINPSVIITGPRENIIDPETSTFKLTNNTFAAQEGFGALSIISISPRFMLTYSNATNDVGEGRFSKSEFCMDPILILMHELNHAMHNLYGIAIPNDQTISSVTSNIFYSQYNVKLEYAEIYAFGGPTIDLIPKSARKYFEEKALDYYRSIAKRLNSITTANPSSFNKYIGEYKQKLIRKYRFVVESSGEVTVNRNKFVELYNELTQIFTEFNYAKIYNVQNRKIYLSNVYTPVTANILDDNVYDIQNGFNIPKSNLNVLFMGQNLSRNPALRKVNPENMLYLFTKFCVDGIITSKTKSLIEGRYADAIFTNSYRKVLGQLSARKLLQDIMSRQQGESNQERGALAGGGGSGGGGSGGGGSALVLQCRELLVKNTDLPFIGDISDVKTDIFLRKDINEETEVIYYPDNVSVDQVILSKNTSEHGQLDLLYPSIDSESEILPGENQVFYDNRTQNVDYLNSYYYLESQKLSDNVEDFTFTRSIEEALDNSAKVYTYFPTLANKVNAGVQGGLFLMWANDVVEDFTTNILRKDTLDKISDVSAIIPYIGPALNISNSVRRGNFTEAFAVTGVTILLEAFPEFTIPALGAFVIYSKVQERNEIIKTIDNCLEQRIKRWKDSYEWMMGTWLSRIITQFNNISYQMYDSLNYQAGAIKAKIDLEYKKYSGSDKENIKSQVENLKNSLDVKISEAMNNINKFIRECSVTYLFKNMLPKVIDELNEFDRNTKAKLINLIDSHNIILVGEVDKLKAKVNNSFQNTIPFNIFSYTNNSLLKDIINEYFN

SEQ ID NO: 97 - protein, 932 aa, Artificial Sequence
  Synthetic sequence
PITINNFNYSDPVDNKNILYLDTHLNTLANEPEKAFRITGNIWVIPDRFSRNSNPNLNKPPRVTSPKSGYYDPNYLSTDSDKDTFLKEIIKLFKRINSREIGEELIYRLSTDIPFPGNNNTPINTFDFDVDFNSVDVKTRQGNNWVKTGSINPSVIITGPRENIIDPETSTFKLTNNTFAAQEGFGALSIISISPRFMLTYSNATNDVGEGRFSKSEFCMDPILILMHELNHAMHNLYGIAIPNDQTISSVTSNIFYSQYNVKLEYAEIYAFGGPTIDLIPKSARKYFEEKALDYYRSIAKRLNSITTANPSSFNKYIGEYKQKLIRKYRFVVESSGEVTVNRNKFVELYNELTQIFTEFNYAKIYNVQNRKIYLSNVYTPVTANILDDNVYDIQNGFNIPKSNLNVLFMGQNLSRNPALRKVNPENMLYLFTKFCVDGIITSKTKSLIEGRYADAIFTNSYRKVLGQLSARKLLQDIMSRQQGESNQERGARARLLAGGGGSGGGGSGGGGSALVLQCRELLVKNTDLPFIGDISDVKTDIFLRKDINEETEVIYYPDNVSVDQVILSKNTSEHGQLDLLYPSIDSESEILPGENQVFYDNRTQNVDYLNSYYYLESQKLSDNVEDFTFTRSIEEALDNSAKVYTYFPTLANKVNAGVQGGLFLMWANDVVEDFTTNILRKDTLDKISDVSAIIPYIGPALNISNSVRRGNFTEAFAVTGVTILLEAFPEFTIPALGAFVIYSKVQERNEIIKTIDNCLEQRIKRWKDSYEWMMGTWLSRIITQFNNISYQMYDSLNYQAGAIKAKIDLEYKKYSGSDKENIKSQVENLKNSLDVKISEAMNNINKFIRECSVTYLFKNMLPKVIDELNEFDRNTKAKLINLIDSHNIILVGEVDKLKAKVNNSFQNTIPFNIFSYTNNSLLKDIINEYFN

SEQ ID NO: 98 - protein, 917 aa, Artificial Sequence
  Synthetic sequence
PITINNFNYSDPVDNKNILYLDTHLNTLANEPEKAFRITGNIWVIPDRFSRNSNPNLNKPPRVTSPKSGYYDPNYLSTDSDKDTFLKEIIKLFKRINSREIGEELIYRLSTDIPFPGNNNTPINTFDFDVDFNSVDVKTRQGNNWVKTGSINPSVIITGPRENIIDPETSTFKLTNNTFAAQEGFGALSIISISPRFMLTYSNATNDVGEGRFSKSEFCMDPILILMHELNHAMHNLYGIAIPNDQTISSVTSNIFYSQYNVKLEYAEIYAFGGPTIDLIPKSARKYFEEKALDYYRSIAKRLNSITTANPSSFNKYIGEYKQKLIRKYRFVVESSGEVTVNRNKFVELYNELTQIFTEFNYAKIYNVQNRKIYLSNVYTPVTANILDDNVYDIQNGFNIPKSNLNVLFMGQNLSRNPALRKVNPENMLYLFTKFCVDGIITSKTKSLIEGRYADAIFTNRYRKVLGQLSARKLLQDIMSRLAGGGGSGGGGSGGGGSALVLQCRELLVKNTDLPFIGDISDVKTDIFLRKDINEETEVIYYPDNVSVDQVILSKNTSEHGQLDLLYPSIDSESEILPGENQVFYDNRTQNVDYLNSYYYLESQKLSDNVEDFTFTRSIEEALDNSAKVYTYFPTLANKVNAGVQGGLFLMWANDVVEDFTTNILRKDTLDKISDVSAIIPYIGPALNISNSVRRGNFTEAFAVTGVTILLEAFPEFTIPALGAFVIYSKVQERNEIIKTIDNCLEQRIKRWKDSYEWMMGTWLSRIITQFNNISYQMYDSLNYQAGAIKAKIDLEYKKYSGSDKENIKSQVENLKNSLDVKISEAMNNINKFIRECSVTYLFKNMLPKVIDELNEFDRNTKAKLINLIDSHNIILVGEVDKLKAKVNNSFQNTIPFNIFSYTNNSLLKDIINEYFN

SEQ ID NO: 99 - protein, 917 aa, Artificial Sequence
  Synthetic sequence
PITINNFNYSDPVDNKNILYLDTHLNTLANEPEKAFRITGNIWVIPDRFSRNSNPNLNKPPRVTSPKSGYYDPNYLSTDSDKDTFLKEIIKLFKRINSREIGEELIYRLSTDIPFPGNNNTPINTFDFDVDFNSVDVKTRQGNNWVKTGSINPSVIITGPRENIIDPETSTFKLTNNTFAAQEGFGALSIISISPRFMLTYSNATNDVGEGRFSKSEFCMDPILILMHELNHAMHNLYGIAIPNDQTISSVTSNIFYSQYNVKLEYAEIYAFGGPTIDLIPKSARKYFEEKALDYYRSIAKRLNSITTANPSSFNKYIGEYKQKLIRKYRFVVESSGEVTVNRNKFVELYNELTQIFTEFNYAKIYNVQNRKIYLSNVYTPVTANILDDNVYDIQNGFNIPKSNLNVLFMGQNLSRNPALRKVNPENMLYLFTKFCVDGIITSKTKSLIEGRYADAIFTARYRKVLGQLSARKLLQDIMSRLAGGGGSGGGGSGGGGSALVLQCRELLVKNTDLPFIGDISDVKTDIFLRKDINEETEVIYYPDNVSVDQVILSKNTSEHGQLDLLYPSIDSESEILPGENQVFYDNRTQNVDYLNSYYYLESQKLSDNVEDFTFTRSIEEALDNSAKVYTYFPTLANKVNAGVQGGLFLMWANDVVEDFTTNILRKDTLDKISDVSAIIPYIGPALNISNSVRRGNFTEAFAVTGVTILLEAFPEFTIPALGAFVIYSKVQERNEIIKTIDNCLEQRIKRWKDSYEWMMGTWLSRIITQFNNISYQMYDSLNYQAGAIKAKIDLEYKKYSGSDKENIKSQVENLKNSLDVKISEAMNNINKFIRECSVTYLFKNMLPKVIDELNEFDRNTKAKLINLIDSHNIILVGEVDKLKAKVNNSFQNTIPFNIFSYTNNSLLKDIINEYFN

SEQ ID NO: 100 - protein, 928 aa, Artificial Sequence
  Synthetic sequence
PITINNFNYSDPVDNKNILYLDTHLNTLANEPEKAFRITGNIWVIPDRFSRNSNPNLNKPPRVTSPKSGYYDPNYLSTDSDKDTFLKEIIKLFKRINSREIGEELIYRLSTDIPFPGNNNTPINTFDFDVDFNSVDVKTRQGNNWVKTGSINPSVIITGPRENIIDPETSTFKLTNNTFAAQEGFGALSIISISPRFMLTYSNATNDVGEGRFSKSEFCMDPILILMHELNHAMHNLYGIAIPNDQTISSVTSNIFYSQYNVKLEYAEIYAFGGPTIDLIPKSARKYFEEKALDYYRSIAKRLNSITTANPSSFNKYIGEYKQKLIRKYRFVVESSGEVTVNRNKFVELYNELTQIFTEFNYAKIYNVQNRKIYLSNVYTPVTANILDDNVYDIQNGFNIPKSNLNVLFMGQNLSRNPALRKVNPENMLYLFTKFCVDGIITSKTKSLIEGRYADAIFTNRYRKVLGQLSARKLLQDIMSRQQGESNQERGALAGGGGSGGGGSGGGGSALVLQCRELLVKNTDLPFIGDISDVKTDIFLRKDINEETEVIYYPDNVSVDQVILSKNTSEHGQLDLLYPSIDSESEILPGENQVFYDNRTQNVDYLNSYYYLESQKLSDNVEDFTFTRSIEEALDNSAKVYTYFPTLANKVNAGVQGGLFLMWANDVVEDFTTNILRKDTLDKISDVSAIIPYIGPALNISNSVRRGNFTEAFAVTGVTILLEAFPEFTIPALGAFVIYSKVQERNEIIKTIDNCLEQRIKRWKDSYEWMMGTWLSRIITQFNNISYQMYDSLNYQAGAIKAKIDLEYKKYSGSDKENIKSQVENLKNSLDVKISEAMNNINKFIRECSVTYLFKNMLPKVIDELNEFDRNTKAKLINLIDSHNIILVGEVDKLKAKVNNSFQNTIPFNIFSYTNNSLLKDIINEYFN

SEQ ID NO: 101 - protein, 932 aa, Artificial Sequence
  Synthetic sequence
PITINNFNYSDPVDNKNILYLDTHLNTLANEPEKAFRITGNIWVIPDRFSRNSNPNLNKPPRVTSPKSGYYDPNYLSTDSDKDTFLKEIIKLFKRINSREIGEELIYRLSTDIPFPGNNNTPINTFDFDVDFNSVDVKTRQGNNWVKTGSINPSVIITGPRENIIDPETSTFKLTNNTFAAQEGFGALSIISISPRFMLTYSNATNDVGEGRFSKSEFCMDPILILMHELNHAMHNLYGIAIPNDQTISSVTSNIFYSQYNVKLEYAEIYAFGGPTIDLIPKSARKYFEEKALDYYRSIAKRLNSITTANPSSFNKYIGEYKQKLIRKYRFVVESSGEVTVNRNKFVELYNELTQIFTEFNYAKIYNVQNRKIYLSNVYTPVTANILDDNVYDIQNGFNIPKSNLNVLFMGQNLSRNPALRKVNPENMLYLFTKFCVDGIITSKTKSLIEGRYADAIFTNRYRKVLGQLSARKLLQDIMSRQQGESNQERGARARLLAGGGGSGGGGSGGGGSALVLQCRELLVKNTDLPFIGDISDVKTDIFLRKDINEETEVIYYPDNVSVDQVILSKNTSEHGQLDLLYPSIDSESEILPGENQVFYDNRTQNVDYLNSYYYLESQKLSDNVEDFTFTRSIEEALDNSAKVYTYFPTLANKVNAGVQGGLFLMWANDVVEDFTTNILRKDTLDKISDVSAIIPYIGPALNISNSVRRGNFTEAFAVTGVTILLEAFPEFTIPALGAFVIYSKVQERNEIIKTIDNCLEQRIKRWKDSYEWMMGTWLSRIITQFNNISYQMYDSLNYQAGAIKAKIDLEYKKYSGSDKENIKSQVENLKNSLDVKISEAMNNINKFIRECSVTYLFKNMLPKVIDELNEFDRNTKAKLINLIDSHNIILVGEVDKLKAKVNNSFQNTIPFNIFSYTNNSLLKDIINEYFN

SEQ ID NO: 102 - protein, 917 aa, Artificial Sequence
  Synthetic sequence
PITINNFNYSDPVDNKNILYLDTHLNTLANEPEKAFRITGNIWVIPDRFSRNSNPNLNKPPRVTSPKSGYYDPNYLSTDSDKDTFLKEIIKLFKRINSREIGEELIYRLSTDIPFPGNNNTPINTFDFDVDFNSVDVKTRQGNNWVKTGSINPSVIITGPRENIIDPETSTFKLTNNTFAAQEGFGALSIISISPRFMLTYSNATNDVGEGRFSKSEFCMDPILILMHELNHAMHNLYGIAIPNDQTISSVTSNIFYSQYNVKLEYAEIYAFGGPTIDLIPKSARKYFEEKALDYYRSIAKRLNSITTANPSSFNKYIGEYKQKLIRKYRFVVESSGEVTVNRNKFVELYNELTQIFTEFNYAKIYNVQNRKIYLSNVYTPVTANILDDNVYDIQNGFNIPKSNLNVLFMGQNLSRNPALRKVNPENMLYLFTKFCVDGIITSKTKSLIEGRYADAIFTNSYRKVRRRRSARKLLQDIMSRLAGGGGSGGGGSGGGGSALVLQCRELLVKNTDLPFIGDISDVKTDIFLRKDINEETEVIYYPDNVSVDQVILSKNTSEHGQLDLLYPSIDSESEILPGENQVFYDNRTQNVDYLNSYYYLESQKLSDNVEDFTFTRSIEEALDNSAKVYTYFPTLANKVNAGVQGGLFLMWANDVVEDFTTNILRKDTLDKISDVSAIIPYIGPALNISNSVRRGNFTEAFAVTGVTILLEAFPEFTIPALGAFVIYSKVQERNEIIKTIDNCLEQRIKRWKDSYEWMMGTWLSRIITQFNNISYQMYDSLNYQAGAIKAKIDLEYKKYSGSDKENIKSQVENLKNSLDVKISEAMNNINKFIRECSVTYLFKNMLPKVIDELNEFDRNTKAKLINLIDSHNIILVGEVDKLKAKVNNSFQNTIPFNIFSYTNNSLLKDIINEYFN

SEQ ID NO: 103 - protein, 928 aa, Artificial Sequence
  Synthetic sequence
PITINNFNYSDPVDNKNILYLDTHLNTLANEPEKAFRITGNIWVIPDRFSRNSNPNLNKPPRVTSPKSGYYDPNYLSTDSDKDTFLKEIIKLFKRINSREIGEELIYRLSTDIPFPGNNNTPINTFDFDVDFNSVDVKTRQGNNWVKTGSINPSVIITGPRENIIDPETSTFKLTNNTFAAQEGFGALSIISISPRFMLTYSNATNDVGEGRFSKSEFCMDPILILMHELNHAMHNLYGIAIPNDQTISSVTSNIFYSQYNVKLEYAEIYAFGGPTIDLIPKSARKYFEEKALDYYRSIAKRLNSITTANPSSFNKYIGEYKQKLIRKYRFVVESSGEVTVNRNKFVELYNELTQIFTEFNYAKIYNVQNRKIYLSNVYTPVTANILDDNVYDIQNGFNIPKSNLNVLFMGQNLSRNPALRKVNPENMLYLFTKFCVDGIITSKTKSLIEGRYADAIFTASYRKVLGQLSARKLLQDIMSRQQGESNQERGALAGGGGSGGGGSGGGGSALVLQCRELLVKNTDLPFIGDISDVKTDIFLRKDINEETEVIYYPDNVSVDQVILSKNTSEHGQLDLLYPSIDSESEILPGENQVFYDNRTQNVDYLNSYYYLESQKLSDNVEDFTFTRSIEEALDNSAKVYTYFPTLANKVNAGVQGGLFLMWANDVVEDFTTNILRKDTLDKISDVSAIIPYIGPALNISNSVRRGNFTEAFAVTGVTILLEAFPEFTIPALGAFVIYSKVQERNEIIKTIDNCLEQRIKRWKDSYEWMMGTWLSRIITQFNNISYQMYDSLNYQAGAIKAKIDLEYKKYSGSDKENIKSQVENLKNSLDVKISEAMNNINKFIRECSVTYLFKNMLPKVIDELNEFDRNTKAKLINLIDSHNIILVGEVDKLKAKVNNSFQNTIPFNIFSYTNNSLLKDIINEYFN

SEQ ID NO: 104 - protein, 927 aa, Artificial Sequence
  Synthetic sequence
MTWPVKDFNYSDPVNDNDILYLRIPQNKLITTPVKAFMITQNIWVIPERFSSDTNPSLSKPPRPTSKYQSYYDPSYLSTDEQKDTFLKGIIKLFKRINERDIGKKLINYLVVGSPFMGDSSTPEDTFDFTRHTTNIAVEKFENGSWKVTNIITPSVLIFGPLPNILDYTASLTLQGQQSNPSFEGFGTLSILKVAPEFLLTFSDVTSNQSSAVLGKSIFCMDPVIALMHELTHSLHQLYGINIPSDKRIRPQVSEGFFSQDGPNVQFEELYTFGGLDVEIIPQIERSQLREKALGHYKDIAKRLNNINKTIPSSWISNIDKYKKIFSEKYNFDKDNTGNFVVNIDKFNSLYSDLTNVMSEVVYSSQYNVKNRTHYFSRHYLPVFANILDDNIYTIRDGFNLTNKGFNIENSGQNIERNPALQKLSSESVVDLFTKVCVDGIITSKTKSLIEGRHVDAIFTQSYRKVLAQLSARKLLQDILNRQQGERNQEQGALAGGGGSGGGGSGGGGSALVLQCIKVKNNRLPYVADKDSISQEIFENKIITDETNVQNYSDKFSLDESILDGQVPINPEIVDPLLPNVNMEPLNLPGEEIVFYDDITKYVDYLNSYYYLESQKLSNNVENITLTTSVEEALGYSNKIYTFLPSLAEKVNKGVQAGLFLNWANEVVEDFTTNIMKKDTLDKISDVSVIIPYIGPALNIGNSALRGNFNQAFATAGVAFLLEGFPEFTIPALGVFTFYSSIQEREKIIKTIENCLEQRVKRWKDSYQWMVSNWLSRITTQFNHINYQMYDSLSYQADAIKAKIDLEYKKYSGSDKENIKSQVENLKNSLDVKISEAMNNINKFIRECSVTYLFKNMLPKVIDELNKFDLRTKTELINLIDSHNIILVGEVDRLKAKVNESFENTMPFNIFSYTNNSLLKDIINEYF

SEQ ID NO: 105 - DNA, 2781 bp, Artificial Sequence
  Synthetic sequence
atgacctggccggtcaaagacttcaactatagcgatccggtcaacgacaacgatatcctgtatctgcgcattccgcagaacaaactgattaccacgccggtgaaagccttcatgattactcagaacatctgggtgatcccggaacgtttttcttccgatactaacccgtctctgtctaaaccgccgcgtccgacctccaaatatcagtcttactacgatccgtcttacctgtccaccgacgaacagaaagacacgtttctgaaaggcatcatcaaactgttcaaacgtatcaacgagcgtgacattggcaaaaaactgatcaactacctggtagtgggttctccgttcatgggtgattctagcactccggaagataccttcgacttcactcgccacaccactaacatcgcagtggaaaaattcgagaacggtagctggaaagtcaccaacatcatcactccgtctgttctgatctttggtccgctgccgaacattctggactatactgcatctctgaccctgcagggtcagcagagcaacccgtccttcgaaggcttcggtaccctgtctatcctgaaagttgcaccggaattcctgctgactttcagcgacgttacctctaaccagtcctctgcagtactgggtaaaagcattttctgcatggacccggttattgctctgatgcatgaactgacccacagcctgcaccagctgtatggtatcaacatcccgtctgataaacgcattcgtccgcaggtctctgaaggtttcttttctcaggatggcccgaacgttcagttcgaggaactgtatactttcggtggcctggatgttgaaatcattccgcagatcgaacgttctcagctgcgcgaaaaagcgctgggtcactacaaagatatcgcaaaacgcctgaacaacatcaacaaaacgattccgtccagctggatctccaacatcgataaatacaaaaaaatcttctccgagaaatacaacttcgataaagacaacactggcaacttcgtggtcaacatcgacaaattcaactctctgtacagcgacctgaccaacgttatgtccgaagtcgtttactcttcccagtacaacgtcaaaaaccgtacccactatttttctcgccactatctgccggtattcgcgaacattctggacgacaacatttacacgatccgcgatggcttcaacctgaccaacaaaggctttaacatcgagaacagcggtcagaacattgaacgtaacccggcactgcagaaactgtcctctgaatctgtggttgatctgtttaccaaagtatgcgtagacggcattatcacctccaaaaccaaatccctgattgaaggtcgccacgtggatgcgatcttcactcagtcttaccgtaaagttctggcgcagctgagcgctcgtaaactgctgcaggatatcctgaaccgtcagcagggtgaacgtaaccaggaacagggcgctctggctggtggcggtggctctggtggcggcggttctggcggcggtggttctgccctggtactgcagtgtatcaaagtgaaaaacaaccgtctgccgtacgttgccgataaagattctatctctcaggagatcttcgagaacaaaattatcaccgacgagaccaacgttcagaactacagcgacaaatttagcctggatgaatccatcctggatggtcaggtgccgatcaacccggaaatcgtagatccgctgctgccgaacgttaacatggaaccgctgaacctgccgggtgaggaaatcgtcttttacgatgacatcaccaaatacgtggactatctgaactcctattactacctggaatcccagaaactgtccaacaacgtcgaaaacattactctgactacgtctgttgaggaagccctgggctactctaacaaaatctacacgtttctgccgtccctggcggaaaaagtaaacaaaggtgttcaggcaggcctgtttctgaactgggctaacgaggttgtggaagatttcaccaccaacattatgaaaaaagacaccctggacaaaatctctgacgtatctgtgatcattccgtacatcggtccggctctgaacattggtaactctgctctgcgtggcaacttcaaccaggcgtttgctactgcaggcgtagctttcctgctggaaggttttccggagtttaccattccggccctgggtgttttcaccttctatagctccattcaggagcgtgagaaaatcattaaaaccatcgagaactgtctggaacagcgcgtgaaacgttggaaagattcttatcagtggatggtttctaactggctgtctcgtatcaccacgcagttcaaccatattaactaccagatgtacgatagcctgtcttaccaggcggacgctatcaaagcgaaaatcgacctggagtataaaaaatactctggcagcgacaaagaaaacatcaaaagccaggtggaaaacctgaaaaactccctggacgtgaaaatctccgaagcgatgaacaacatcaacaaatttatccgtgagtgcagcgtcacgtacctgttcaaaaacatgctgccgaaagtgatcgacgagctgaacaaatttgacctgcgcaccaaaaccgagctgatcaacctgattgattcccataacatcatcctggtaggtgaagttgaccgtctgaaagcgaaagttaacgaatctttcgaaaacactatgccgttcaacatttttagctataccaacaactctctgctgaaagacattatcaacgaatacttc
